United States Patent Application Publication US 2009/0181380 A1 - sequence listing, part 7

SEQ ID NO: 15596 - DNA, 21 bp, Homo sapiens
atggcaaacartaagtataat

SEQ ID NO: 15597 - DNA, 21 bp, Homo sapiens
catcaatttcwttctcagtag

SEQ ID NO: 15598 - DNA, 21 bp, Homo sapiens
taagagactgmaaattctcag

SEQ ID NO: 15599 - DNA, 21 bp, Homo sapiens
gtgtttaaatyttgaaagcaa

SEQ ID NO: 15600 - DNA, 21 bp, Homo sapiens
ttctaatgcckgcttaagata

SEQ ID NO: 15601 - DNA, 21 bp, Homo sapiens
tttgaggaaaktaaagatctt

SEQ ID NO: 15602 - DNA, 21 bp, Homo sapiens
caaaagccttrctatctcagc

SEQ ID NO: 15603 - DNA, 21 bp, Homo sapiens
ccttccggacrtgtcagatag

SEQ ID NO: 15604 - DNA, 21 bp, Homo sapiens
atgatattcarctaacactgc

SEQ ID NO: 15605 - DNA, 21 bp, Homo sapiens
aaaacataatyattatggagt

SEQ ID NO: 15606 - DNA, 21 bp, Homo sapiens
cagatatagayttagtaaata

SEQ ID NO: 15607 - DNA, 21 bp, Homo sapiens
tattacatttyattttgcttt

SEQ ID NO: 15608 - DNA, 21 bp, Homo sapiens
ttcaaactccrttcagccata

SEQ ID NO: 15609 - DNA, 21 bp, Homo sapiens
ttgctttcttsttcaaggctt

SEQ ID NO: 15610 - DNA, 21 bp, Homo sapiens
gagaaatggcyaccaaaaaca

SEQ ID NO: 15611 - DNA, 21 bp, Homo sapiens
ccttattttargttatttaca

SEQ ID NO: 15612 - DNA, 21 bp, Homo sapiens
atagttgtgcyaagaacagag

SEQ ID NO: 15613 - DNA, 21 bp, Homo sapiens
aaattaaagtrggcttactct

SEQ ID NO: 15614 - DNA, 21 bp, Homo sapiens
gatggaaagargcctagcagt

SEQ ID NO: 15615 - DNA, 21 bp, Homo sapiens
gttttctgtamaaactgtagc

SEQ ID NO: 15616 - DNA, 21 bp, Homo sapiens
actcctttcayagtggccaaa

SEQ ID NO: 15617 - DNA, 21 bp, Homo sapiens
ccaggtgagartctgtaagga

SEQ ID NO: 15618 - DNA, 21 bp, Homo sapiens
tgcaaagtgcrtaatgaagat

SEQ ID NO: 15619 - DNA, 21 bp, Homo sapiens
attcaagtacrctaatatcat

SEQ ID NO: 15620 - DNA, 21 bp, Homo sapiens
aatctaatatrtctggaattc

SEQ ID NO: 15621 - DNA, 21 bp, Homo sapiens
tatactgtgascatatttcca

SEQ ID NO: 15622 - DNA, 21 bp, Homo sapiens
aaattcgaagragcaaatttc

SEQ ID NO: 15623 - DNA, 21 bp, Homo sapiens
gtaggaatttstctctgatgg

SEQ ID NO: 15624 - DNA, 21 bp, Homo sapiens
attgtaagacmaccaggcaat

SEQ ID NO: 15625 - DNA, 21 bp, Homo sapiens
ccagcccaaaycaaaaaggaa

SEQ ID NO: 15626 - DNA, 21 bp, Homo sapiens
acattctgctscctgtgagat

SEQ ID NO: 15627 - DNA, 21 bp, Homo sapiens
gctgtcagtasgttgagcctg

SEQ ID NO: 15628 - DNA, 21 bp, Homo sapiens
gagacaagctrtagagtcaaa

SEQ ID NO: 15629 - DNA, 21 bp, Homo sapiens
aaactgcctaygaattagttt

SEQ ID NO: 15630 - DNA, 21 bp, Homo sapiens
gggcagaggcrcaggtctgtg

SEQ ID NO: 15631 - DNA, 21 bp, Homo sapiens
ggtaaaacatrcagacttcta

SEQ ID NO: 15632 - DNA, 21 bp, Homo sapiens
cagattggaawtattaccttc

SEQ ID NO: 15633 - DNA, 21 bp, Homo sapiens
agcaaagggcrggaccacgtg

SEQ ID NO: 15634 - DNA, 21 bp, Homo sapiens
ccttctctttygtaggttgaa

SEQ ID NO: 15635 - DNA, 21 bp, Homo sapiens
gcagggactcrgcaggacagc

SEQ ID NO: 15636 - DNA, 21 bp, Homo sapiens
catttcttctyatcacagaca

SEQ ID NO: 15637 - DNA, 21 bp, Homo sapiens
agatagtttcwttggtgataa

SEQ ID NO: 15638 - DNA, 21 bp, Homo sapiens
caaataggttrtagttccagt

SEQ ID NO: 15639 - DNA, 21 bp, Homo sapiens
ttttgaataaytgctgaattt

SEQ ID NO: 15640 - DNA, 21 bp, Homo sapiens
caggggcagamaaaggtcagc

SEQ ID NO: 15641 - DNA, 21 bp, Homo sapiens
tccgtgagaaytaatgcttat

SEQ ID NO: 15642 - DNA, 21 bp, Homo sapiens
caatataattrtgtgggtgaa

SEQ ID NO: 15643 - DNA, 21 bp, Homo sapiens
gcaaggttggyatgccttgcc

SEQ ID NO: 15644 - DNA, 21 bp, Homo sapiens
ttctttttccstaaatgattc

SEQ ID NO: 15645 - DNA, 21 bp, Homo sapiens
atgaagatagrcagaaaaaat

SEQ ID NO: 15646 - DNA, 21 bp, Homo sapiens
tttttgtaacrtgatttgtaa

SEQ ID NO: 15647 - DNA, 21 bp, Homo sapiens
gtaagaaagcwtcctgagctg

SEQ ID NO: 15648 - DNA, 21 bp, Homo sapiens
atcatcacccmttctgcaccc

SEQ ID NO: 15649 - DNA, 21 bp, Homo sapiens
tcacacctttkttttcaactg

SEQ ID NO: 15650 - DNA, 21 bp, Homo sapiens
ttgaaagcagyctctgagcat

SEQ ID NO: 15651 - DNA, 21 bp, Homo sapiens
cccattagcarcagggcctgg

SEQ ID NO: 15652 - DNA, 21 bp, Homo sapiens
ggctggagcarctgagtaaga

SEQ ID NO: 15653 - DNA, 21 bp, Homo sapiens
gcttggcctcrtgttggttct

SEQ ID NO: 15654 - DNA, 21 bp, Homo sapiens
caggtctgtarcggtgagata

SEQ ID NO: 15655 - DNA, 21 bp, Homo sapiens
ttttacaggcktttgtatttt

SEQ ID NO: 15656 - DNA, 21 bp, Homo sapiens
ttatatcaccrttttattcac

SEQ ID NO: 15657 - DNA, 21 bp, Homo sapiens
tgttgcagatwtttttcccag

SEQ ID NO: 15658 - DNA, 21 bp, Homo sapiens
aataacttgtrtccaaaatag

SEQ ID NO: 15659 - DNA, 21 bp, Homo sapiens
aaagagcaggracttggcgtt

SEQ ID NO: 15660 - DNA, 21 bp, Homo sapiens
atcctggctcygtcaaagacc

SEQ ID NO: 15661 - DNA, 21 bp, Homo sapiens
gttcatgcccrtaggtaaaat

SEQ ID NO: 15662 - DNA, 21 bp, Homo sapiens
ttaaatgtacwactgtcttca

SEQ ID NO: 15663 - DNA, 21 bp, Homo sapiens
atatcagctayaaaacatttg

SEQ ID NO: 15664 - DNA, 21 bp, Homo sapiens
ctaacaatttkccaaggctaa

SEQ ID NO: 15665 - DNA, 21 bp, Homo sapiens
attgtaggtastattttcatc

SEQ ID NO: 15666 - DNA, 21 bp, Homo sapiens
acgcagtccayttggtagatc

SEQ ID NO: 15667 - DNA, 21 bp, Homo sapiens
aactcccaggsggaacactta

SEQ ID NO: 15668 - DNA, 21 bp, Homo sapiens
tagcaagcagraagcaggact

SEQ ID NO: 15669 - DNA, 21 bp, Homo sapiens
cacagcttcaktcacctatgt

SEQ ID NO: 15670 - DNA, 21 bp, Homo sapiens
tgccttaatayggaaactcag

SEQ ID NO: 15671 - DNA, 21 bp, Homo sapiens
tcattcatcartaatcattta

SEQ ID NO: 15672 - DNA, 21 bp, Homo sapiens
acccagtgcaraagcaaacct

SEQ ID NO: 15673 - DNA, 21 bp, Homo sapiens
gcaggttaccyggtcctagct

SEQ ID NO: 15674 - DNA, 21 bp, Homo sapiens
agttttcatgstattgttgtg

SEQ ID NO: 15675 - DNA, 21 bp, Homo sapiens
gctatttaaamaagtcctgtg

SEQ ID NO: 15676 - DNA, 21 bp, Homo sapiens
cactacttttyagtcatggct

SEQ ID NO: 15677 - DNA, 21 bp, Homo sapiens
ttaccatcaayacaaattaaa

SEQ ID NO: 15678 - DNA, 21 bp, Homo sapiens
tctttggtttwaccgtcacat

SEQ ID NO: 15679 - DNA, 21 bp, Homo sapiens
cttcatattcrctaagccata

SEQ ID NO: 15680 - DNA, 21 bp, Homo sapiens
gaaagctctartaggaccctg

SEQ ID NO: 15681 - DNA, 21 bp, Homo sapiens
cagtcactcasagattccacc

SEQ ID NO: 15682 - DNA, 21 bp, Homo sapiens
cagcctcacgyttcattgtgg

SEQ ID NO: 15683 - DNA, 21 bp, Homo sapiens
tgccatcccaygaagcagttt

SEQ ID NO: 15684 - DNA, 21 bp, Homo sapiens
gttgctttacwgtgaccttta

SEQ ID NO: 15685 - DNA, 21 bp, Homo sapiens
ccagcagaaayaagacgtgca

SEQ ID NO: 15686 - DNA, 21 bp, Homo sapiens
cacctgtctgygtattcagga

SEQ ID NO: 15687 - DNA, 21 bp, Homo sapiens
ggcaataaagrcttggacccc

SEQ ID NO: 15688 - DNA, 21 bp, Homo sapiens
cagcacaaagmgagacatatt

SEQ ID NO: 15689 - DNA, 21 bp, Homo sapiens
aaaaagcaatrttcaatgaat

SEQ ID NO: 15690 - DNA, 21 bp, Homo sapiens
tattataacaygctgctggag

SEQ ID NO: 15691 - DNA, 21 bp, Homo sapiens
gcacattcgcmacacactgtt

SEQ ID NO: 15692 - DNA, 21 bp, Homo sapiens
acaggacattytgctgcccag

SEQ ID NO: 15693 - DNA, 21 bp, Homo sapiens
caaataaggcrtcttcgtgta

SEQ ID NO: 15694 - DNA, 21 bp, Homo sapiens
caagtttaagstcctttgaag

SEQ ID NO: 15695 - DNA, 21 bp, Homo sapiens
gatgtgctgamccctattgca

SEQ ID NO: 15696 - DNA, 21 bp, Homo sapiens
aggaaagaaargtctcataat

SEQ ID NO: 15697 - DNA, 21 bp, Homo sapiens
tgtagggcaarggtcatacta

SEQ ID NO: 15698 - DNA, 21 bp, Homo sapiens
tacaccacgtrgtgatgacgt

SEQ ID NO: 15699 - DNA, 21 bp, Homo sapiens
actcagtttartggcgagagg

SEQ ID NO: 15700 - DNA, 21 bp, Homo sapiens
tcattctactkttctcagtga

SEQ ID NO: 15701 - DNA, 21 bp, Homo sapiens
agggaggcacragtgtcagct

SEQ ID NO: 15702 - DNA, 21 bp, Homo sapiens
tttaagagctraaaattcaaa

SEQ ID NO: 15703 - DNA, 21 bp, Homo sapiens
cttaataaaayggagaataca

SEQ ID NO: 15704 - DNA, 21 bp, Homo sapiens
tagaaagaaartcacctggag

SEQ ID NO: 15705 - DNA, 21 bp, Homo sapiens
tttagattaakaggtagagct

SEQ ID NO: 15706 - DNA, 21 bp, Homo sapiens
caataacattrtcttgtttac

SEQ ID NO: 15707 - DNA, 21 bp, Homo sapiens
cacactcctamactgataggc

SEQ ID NO: 15708 - DNA, 21 bp, Homo sapiens
ctttcattacwattcttcctt

SEQ ID NO: 15709 - DNA, 21 bp, Homo sapiens
catcgtgcccrtcccatttta

SEQ ID NO: 15710 - DNA, 21 bp, Homo sapiens
tatttaatttwaaaatttttt

SEQ ID NO: 15711 - DNA, 21 bp, Homo sapiens
tgcagttctcrgaggaggaat

SEQ ID NO: 15712 - DNA, 21 bp, Homo sapiens
ggccatctctyccacgaattc

SEQ ID NO: 15713 - DNA, 21 bp, Homo sapiens
gcagggaatgytcatggggat

SEQ ID NO: 15714 - DNA, 21 bp, Homo sapiens
aaaaaacaaamaacctaattc

SEQ ID NO: 15715 - DNA, 21 bp, Homo sapiens
tgcctgtctcycttttgcaag

SEQ ID NO: 15716 - DNA, 21 bp, Homo sapiens
ttaaaagtgtycttgtagacc

SEQ ID NO: 15717 - DNA, 21 bp, Homo sapiens
ctcttagaacyggttgtttaa

SEQ ID NO: 15718 - DNA, 21 bp, Homo sapiens
aaccaggttcyatagagagag

SEQ ID NO: 15719 - DNA, 21 bp, Homo sapiens
gcagagactckagaggtctga

SEQ ID NO: 15720 - DNA, 21 bp, Homo sapiens
gaattttattktagtcatatg

SEQ ID NO: 15721 - DNA, 21 bp, Homo sapiens
ctggtgaggtycagaaaattg

SEQ ID NO: 15722 - DNA, 21 bp, Homo sapiens
taccctccatrtaagcactgt

SEQ ID NO: 15723 - DNA, 21 bp, Homo sapiens
gcaggggatgygtaatggcag

SEQ ID NO: 15724 - DNA, 21 bp, Homo sapiens
aagatcaaatyagttacaaaa

SEQ ID NO: 15725 - DNA, 21 bp, Homo sapiens
gaaagcctccrtctcacctca

SEQ ID NO: 15726 - DNA, 21 bp, Homo sapiens
acagccttaartgttggagaa

SEQ ID NO: 15727 - DNA, 21 bp, Homo sapiens
tgtttcactaygaacattatg

SEQ ID NO: 15728 - DNA, 21 bp, Homo sapiens
ccgacctccartcaaagttcc

SEQ ID NO: 15729 - DNA, 21 bp, Homo sapiens
tgtgtcaccargtattttttt

SEQ ID NO: 15730 - DNA, 21 bp, Homo sapiens
ctcttaacttmctctagaata

SEQ ID NO: 15731 - DNA, 21 bp, Homo sapiens
tatcccatatwcttttgtatc

SEQ ID NO: 15732 - DNA, 21 bp, Homo sapiens
gtatagatctragtaagctac

SEQ ID NO: 15733 - DNA, 21 bp, Homo sapiens
aaatagggacwagagtttcca

SEQ ID NO: 15734 - DNA, 21 bp, Homo sapiens
ttggacaatawgtgattgact

SEQ ID NO: 15735 - DNA, 21 bp, Homo sapiens
aaaatagcttraagatgtact

SEQ ID NO: 15736 - DNA, 21 bp, Homo sapiens
tagtccatttsatctgaaaaa

SEQ ID NO: 15737 - DNA, 21 bp, Homo sapiens
attgcacaaakaatagtcttc

SEQ ID NO: 15738 - DNA, 21 bp, Homo sapiens
aatgagcccasgagactctaa

SEQ ID NO: 15739 - DNA, 21 bp, Homo sapiens
gacagagactrtaaaaacagg

SEQ ID NO: 15740 - DNA, 21 bp, Homo sapiens
agctggaagawttttttagat

SEQ ID NO: 15741 - DNA, 21 bp, Homo sapiens
aaacacaaacwtgtctgctat

SEQ ID NO: 15742 - DNA, 21 bp, Homo sapiens
gtaggaattaygtgtatgcgt

SEQ ID NO: 15743 - DNA, 21 bp, Homo sapiens
tcagtggctayaatgactatg

SEQ ID NO: 15744 - DNA, 21 bp, Homo sapiens
aaaatgtttcrtgatatagac

SEQ ID NO: 15745 - DNA, 21 bp, Homo sapiens
cataaattttyaagagttcaa

SEQ ID NO: 15746 - DNA, 21 bp, Homo sapiens
gagtggaaaaygattcatatt

SEQ ID NO: 15747 - DNA, 21 bp, Homo sapiens
gatggctcttmtgtggaaatg

SEQ ID NO: 15748 - DNA, 21 bp, Homo sapiens
ttaattctcaytatctaaccc

SEQ ID NO: 15749 - DNA, 21 bp, Homo sapiens
atggatctaayagacattttc

SEQ ID NO: 15750 - DNA, 21 bp, Homo sapiens
tgcttgtctcrtttgttcact

SEQ ID NO: 15751 - DNA, 21 bp, Homo sapiens
aaggctacaayagattgcaat

SEQ ID NO: 15752 - DNA, 21 bp, Homo sapiens
agactttaccrcggttccctt

SEQ ID NO: 15753 - DNA, 21 bp, Homo sapiens
cacagatgctmtaagtcaact

SEQ ID NO: 15754 - DNA, 21 bp, Homo sapiens
aatcagtatcyggatcaggac

SEQ ID NO: 15755 - DNA, 21 bp, Homo sapiens
ccaataagacraaaaggatag

SEQ ID NO: 15756 - DNA, 21 bp, Homo sapiens
tgtatgtacasgaaaaagaga

SEQ ID NO: 15757 - DNA, 21 bp, Homo sapiens
atatatgctaygctttccttt

SEQ ID NO: 15758 - DNA, 21 bp, Homo sapiens
tatctactatraaatgtattc

SEQ ID NO: 15759 - DNA, 21 bp, Homo sapiens
tgtaacccatwtaaaagtgca

SEQ ID NO: 15760 - DNA, 21 bp, Homo sapiens
ctaaagctgartttcctacat

SEQ ID NO: 15761 - DNA, 21 bp, Homo sapiens
cttgtccatcrtccgcggaaa

SEQ ID NO: 15762 - DNA, 21 bp, Homo sapiens
agaagtatacraaaagatgct

SEQ ID NO: 15763 - DNA, 21 bp, Homo sapiens
aatgtcaccaygaccaagtta

SEQ ID NO: 15764 - DNA, 21 bp, Homo sapiens
ataagtgggtwtgggagctga

SEQ ID NO: 15765 - DNA, 21 bp, Homo sapiens
tcaatgaaacrgtcttacaaa

SEQ ID NO: 15766 - DNA, 21 bp, Homo sapiens
acgatattagytgatcatttc

SEQ ID NO: 15767 - DNA, 21 bp, Homo sapiens
tctgctattgygagctcctgc

SEQ ID NO: 15768 - DNA, 21 bp, Homo sapiens
gtatttgatgmtctgatctgt

SEQ ID NO: 15769 - DNA, 21 bp, Homo sapiens
ttaaactggawcatcatattt

SEQ ID NO: 15770 - DNA, 21 bp, Homo sapiens
ttaaatgtcaratcttctcaa

SEQ ID NO: 15771 - DNA, 21 bp, Homo sapiens
ctccacacccrtgatcaagtc

SEQ ID NO: 15772 - DNA, 21 bp, Homo sapiens
tgaaatttttycacctatagt

SEQ ID NO: 15773 - DNA, 21 bp, Homo sapiens
ttagtgcaacratgaaaactg

SEQ ID NO: 15774 - DNA, 21 bp, Homo sapiens
gtttaaatagraacgctgcaa

SEQ ID NO: 15775 - DNA, 21 bp, Homo sapiens
actgaggataytggaaaacca

SEQ ID NO: 15776 - DNA, 21 bp, Homo sapiens
tgcctcattcycagttggcct

SEQ ID NO: 15777 - DNA, 21 bp, Homo sapiens
ggttatttgtstcatgtcact

SEQ ID NO: 15778 - DNA, 21 bp, Homo sapiens
atgttaacacrgacctcttgt

SEQ ID NO: 15779 - DNA, 21 bp, Homo sapiens
gattaagaccrtcagtattat

SEQ ID NO: 15780 - DNA, 21 bp, Homo sapiens
gaaaacagatkaggacaggta

SEQ ID NO: 15781 - DNA, 21 bp, Homo sapiens
ctccactttamcgaaaagaaa

SEQ ID NO: 15782 - DNA, 21 bp, Homo sapiens
ttaggtagagwtgaattttta

SEQ ID NO: 15783 - DNA, 21 bp, Homo sapiens
tgctggaagarttccatgctg

SEQ ID NO: 15784 - DNA, 21 bp, Homo sapiens
gcttttcagamtgcctggaaa

SEQ ID NO: 15785 - DNA, 21 bp, Homo sapiens
cctgcagttakgctgcctcta

SEQ ID NO: 15786 - DNA, 21 bp, Homo sapiens
agaaacaaacwaactcacttt

SEQ ID NO: 15787 - DNA, 21 bp, Homo sapiens
tcatgatgatkattttcattg

SEQ ID NO: 15788 - DNA, 21 bp, Homo sapiens
catctggctgmcctttttcct

SEQ ID NO: 15789 - DNA, 21 bp, Homo sapiens
ttcagatgacratgatgatgt

SEQ ID NO: 15790 - DNA, 21 bp, Homo sapiens
ttgataaaggygccatgaagg

SEQ ID NO: 15791 - DNA, 21 bp, Homo sapiens
atacagtgctygaatactctt

SEQ ID NO: 15792 - DNA, 21 bp, Homo sapiens
caaagaatatsactgaatttg

SEQ ID NO: 15793 - DNA, 21 bp, Homo sapiens
atgaagttttrgtgttaaata

SEQ ID NO: 15794 - DNA, 21 bp, Homo sapiens
actacgttctmaaacaccctc

SEQ ID NO: 15795 - DNA, 21 bp, Homo sapiens
gatcacacttrtatcagaaga

SEQ ID NO: 15796 - DNA, 21 bp, Homo sapiens
aacaaaatcamgatagaaatt

SEQ ID NO: 15797 - DNA, 21 bp, Homo sapiens
tgatggtgtgygaagtcctag

SEQ ID NO: 15798 - DNA, 21 bp, Homo sapiens
cctctaaaatrttgactaaac

SEQ ID NO: 15799 - DNA, 21 bp, Homo sapiens
caatcttgttrtcaaaatagg

SEQ ID NO: 15800 - DNA, 21 bp, Homo sapiens
aaatcaagatrggtagaggta

SEQ ID NO: 15801 - DNA, 21 bp, Homo sapiens
aagagtggagwttctcctgca

SEQ ID NO: 15802 - DNA, 21 bp, Homo sapiens
cccatttttgyggtggttcag

SEQ ID NO: 15803 - DNA, 21 bp, Homo sapiens
tatttttcttyaggggttcca

SEQ ID NO: 15804 - DNA, 21 bp, Homo sapiens
acctagattgwaagtcatcta

SEQ ID NO: 15805 - DNA, 21 bp, Homo sapiens
ttctaaatatmctgtttgatt

SEQ ID NO: 15806 - DNA, 21 bp, Homo sapiens
gaaattactgycattactagt

SEQ ID NO: 15807 - DNA, 21 bp, Homo sapiens
agcacttgaawgattaaaaga

SEQ ID NO: 15808 - DNA, 21 bp, Homo sapiens
tttctgccagwtatacgctgc

SEQ ID NO: 15809 - DNA, 21 bp, Homo sapiens
tttagtggaaratatgtatca

SEQ ID NO: 15810 - DNA, 21 bp, Homo sapiens
ttctattagcwagaacaaagg

SEQ ID NO: 15811 - DNA, 21 bp, Homo sapiens
tgttataaacrattacattta

SEQ ID NO: 15812 - DNA, 21 bp, Homo sapiens
tttgtattctstgtcatgttc

SEQ ID NO: 15813 - DNA, 21 bp, Homo sapiens
ctgtgagaccragcaggccag

SEQ ID NO: 15814 - DNA, 21 bp, Homo sapiens
ggaaaggtagraacagcacag

SEQ ID NO: 15815 - DNA, 21 bp, Homo sapiens
caaccactccratgatatcac

SEQ ID NO: 15816 - DNA, 21 bp, Homo sapiens
tgctctaaacyagagaacata

SEQ ID NO: 15817 - DNA, 21 bp, Homo sapiens
ggtgacagacwggtccacata

SEQ ID NO: 15818 - DNA, 21 bp, Homo sapiens
ccctgtataasagacattgga

SEQ ID NO: 15819 - DNA, 21 bp, Homo sapiens
gtctggacagygacatcttga

SEQ ID NO: 15820 - DNA, 21 bp, Homo sapiens
ttgtcagaaawaaacagatgc

SEQ ID NO: 15821 - DNA, 21 bp, Homo sapiens
gctggcctgtrgtgaatgctt

SEQ ID NO: 15822 - DNA, 21 bp, Homo sapiens
acgaggacacyggagctggca

SEQ ID NO: 15823 - DNA, 21 bp, Homo sapiens
cactaggaagstttttaaaca

SEQ ID NO: 15824 - DNA, 21 bp, Homo sapiens
ctcttccaaasataagtctat

SEQ ID NO: 15825 - DNA, 21 bp, Homo sapiens
cccccatcttyacacatattt

SEQ ID NO: 15826 - DNA, 21 bp, Homo sapiens
aggattgcacrtgaaataatt

SEQ ID NO: 15827 - DNA, 21 bp, Homo sapiens
gctcacattakggaaaaagaa

SEQ ID NO: 15828 - DNA, 21 bp, Homo sapiens
tgataaatagygaaggcagac

SEQ ID NO: 15829 - DNA, 21 bp, Homo sapiens
taaacttacgyaggctgggtg

SEQ ID NO: 15830 - DNA, 21 bp, Homo sapiens
gatagaagttstcgagagtaa

SEQ ID NO: 15831 - DNA, 21 bp, Homo sapiens
ggcagaactcktggaccttgc

SEQ ID NO: 15832 - DNA, 21 bp, Homo sapiens
ttcggaggccygaggaacaaa

SEQ ID NO: 15833 - DNA, 21 bp, Homo sapiens
ttctggcttcrcttcttcatt

SEQ ID NO: 15834 - DNA, 21 bp, Homo sapiens
ctaacaacaamgacaatagac

SEQ ID NO: 15835 - DNA, 21 bp, Homo sapiens
ctaccagaggsaactgtgtac

SEQ ID NO: 15836 - DNA, 21 bp, Homo sapiens
ctacacttgcrttctagacac

SEQ ID NO: 15837 - DNA, 21 bp, Homo sapiens
agtagtccgtyaaacagggaa

SEQ ID NO: 15838 - DNA, 21 bp, Homo sapiens
gacctattgaktcctttcgga

SEQ ID NO: 15839 - DNA, 21 bp, Homo sapiens
ccagaagtgcmgacgtcacca

SEQ ID NO: 15840 - DNA, 21 bp, Homo sapiens
aagaaacagarctaggattga

SEQ ID NO: 15841 - DNA, 21 bp, Homo sapiens
attgttgagcrgttattaact

SEQ ID NO: 15842 - DNA, 21 bp, Homo sapiens
atcacgatttrtagctctgat

SEQ ID NO: 15843 - DNA, 21 bp, Homo sapiens
ccagctttccwtgactggtac

SEQ ID NO: 15844 - DNA, 21 bp, Homo sapiens
acaactaaatmgcattatcca

SEQ ID NO: 15845 - DNA, 21 bp, Homo sapiens
acgattacaayaggtgttact

SEQ ID NO: 15846 - DNA, 21 bp, Homo sapiens
ttttaaaaaaygtatgtcaaa

SEQ ID NO: 15847 - DNA, 21 bp, Homo sapiens
acgtgcaggakgaagtccgcg

SEQ ID NO: 15848 - DNA, 21 bp, Homo sapiens
ttctcaaaacyagattacaga

SEQ ID NO: 15849 - DNA, 21 bp, Homo sapiens
ccaggtacttmgacttagcat

SEQ ID NO: 15850 - DNA, 21 bp, Homo sapiens
atacatgtccrgcatttgcaa

SEQ ID NO: 15851 - DNA, 21 bp, Homo sapiens
attttactttwtctataggga

SEQ ID NO: 15852 - DNA, 21 bp, Homo sapiens
gcctctgccaycagtcaaaat

SEQ ID NO: 15853 - DNA, 21 bp, Homo sapiens
cggaattcccrtgaagagcct

SEQ ID NO: 15854 - DNA, 21 bp, Homo sapiens
ttgacacagcmgcagaccaat

SEQ ID NO: 15855 - DNA, 21 bp, Homo sapiens
gtgtttccgaracttgatgag

SEQ ID NO: 15856 - DNA, 21 bp, Homo sapiens
cccttagtgtygtttattcaa

SEQ ID NO: 15857 - DNA, 21 bp, Homo sapiens
catatatgctmtcagaaagat

SEQ ID NO: 15858 - DNA, 21 bp, Homo sapiens
ttctgcctccraaataaggca

SEQ ID NO: 15859 - DNA, 21 bp, Homo sapiens
gtaactttgcwgtacataatc

SEQ ID NO: 15860 - DNA, 21 bp, Homo sapiens
aggaacaggcytaaatgagta

SEQ ID NO: 15861 - DNA, 21 bp, Homo sapiens
cacctggactragaggctctc

SEQ ID NO: 15862 - DNA, 21 bp, Homo sapiens
cctctataacygtttcctggg

SEQ ID NO: 15863 - DNA, 21 bp, Homo sapiens
ccagggaagayagccaactgg

SEQ ID NO: 15864 - DNA, 21 bp, Homo sapiens
ttttagtcaamctttctatac

SEQ ID NO: 15865 - DNA, 21 bp, Homo sapiens
tagcggataaygtcctgattg

SEQ ID NO: 15866 - DNA, 21 bp, Homo sapiens
gagagtctttyagaaacagca

SEQ ID NO: 15867 - DNA, 21 bp, Homo sapiens
ccatgtactcragaactcaga

SEQ ID NO: 15868 - DNA, 21 bp, Homo sapiens
gctgtagaacyattccatctg

SEQ ID NO: 15869 - DNA, 21 bp, Homo sapiens
ggccacctgamaaagggaaag

SEQ ID NO: 15870 - DNA, 21 bp, Homo sapiens
ctcgtgaaaamacagattcag

SEQ ID NO: 15871 - DNA, 21 bp, Homo sapiens
cctttcagacyatgtagttac

SEQ ID NO: 15872 - DNA, 21 bp, Homo sapiens
acaatataacscagtaactac

SEQ ID NO: 15873 - DNA, 21 bp, Homo sapiens
ctgtagtacawgatgatgtca

SEQ ID NO: 15874 - DNA, 21 bp, Homo sapiens
aacctattgtsacggaaatgc

SEQ ID NO: 15875 - DNA, 21 bp, Homo sapiens
gaagccaaatytaggagcttg

SEQ ID NO: 15876 - DNA, 21 bp, Homo sapiens
tgagggtagakcccggtaaaa

SEQ ID NO: 15877 - DNA, 21 bp, Homo sapiens
ctgggtttcasaatattcttc

SEQ ID NO: 15878 - DNA, 21 bp, Homo sapiens
tgagttcttcrtgtttattac

SEQ ID NO: 15879 - DNA, 21 bp, Homo sapiens
aacatccctcrtactgtctgg

SEQ ID NO: 15880 - DNA, 21 bp, Homo sapiens
gccaagtccarttgattctgt

SEQ ID NO: 15881 - DNA, 21 bp, Homo sapiens
gatgggaaatraaagtctgat

SEQ ID NO: 15882 - DNA, 21 bp, Homo sapiens
gtcagttatgsacattttatt

SEQ ID NO: 15883 - DNA, 21 bp, Homo sapiens
aatattatccmaaaattctgt

SEQ ID NO: 15884 - DNA, 21 bp, Homo sapiens
ctcttcacagrtaaaacaagg

SEQ ID NO: 15885 - DNA, 21 bp, Homo sapiens
tttagtaaaasttaaagtcaa

SEQ ID NO: 15886 - DNA, 21 bp, Homo sapiens
gtctgcagagrtggatgcctg

SEQ ID NO: 15887 - DNA, 21 bp, Homo sapiens
gccacaaccaytgcaatacat

SEQ ID NO: 15888 - DNA, 21 bp, Homo sapiens
ttcccttaatyggcataaaat

SEQ ID NO: 15889 - DNA, 21 bp, Homo sapiens
tatttcctacygtcctgcatc

SEQ ID NO: 15890 - DNA, 21 bp, Homo sapiens
actatcttctwtaggtgactc

SEQ ID NO: 15891 - DNA, 21 bp, Homo sapiens
aaacagcctgyttcttctcac

SEQ ID NO: 15892 - DNA, 21 bp, Homo sapiens
ctctctcatcyctaagtaggc

SEQ ID NO: 15893 - DNA, 21 bp, Homo sapiens
tgcatagtacytttgtgggaa

SEQ ID NO: 15894 - DNA, 21 bp, Homo sapiens
gattttctgtrtagtctgaca

SEQ ID NO: 15895 - DNA, 21 bp, Homo sapiens
gctgtccattrctttttaact

SEQ ID NO: 15896 - DNA, 21 bp, Homo sapiens
tcttctactgytcaaatggca

SEQ ID NO: 15897 - DNA, 21 bp, Homo sapiens
ttaatgaacarctactccaga

SEQ ID NO: 15898 - DNA, 21 bp, Homo sapiens
aacagcagggsattggatagt

SEQ ID NO: 15899 - DNA, 21 bp, Homo sapiens
tgaagagtcasagattagtgc

SEQ ID NO: 15900 - DNA, 21 bp, Homo sapiens
aatttggatcrtctcaaacta

SEQ ID NO: 15901 - DNA, 21 bp, Homo sapiens
aagagctagtyctctttagta

SEQ ID NO: 15902 - DNA, 21 bp, Homo sapiens
aaggaatctgmgaggtaaaga

SEQ ID NO: 15903 - DNA, 21 bp, Homo sapiens
caattcttcarcttctacaat

SEQ ID NO: 15904 - DNA, 21 bp, Homo sapiens
cagccaaaaastatatttaaa

SEQ ID NO: 15905 - DNA, 21 bp, Homo sapiens
aactgcaaaaytgacagagat

SEQ ID NO: 15906 - DNA, 21 bp, Homo sapiens
atggaacactsaaccagaatg

SEQ ID NO: 15907 - DNA, 21 bp, Homo sapiens
ttaccattgaytcatttatca

SEQ ID NO: 15908 - DNA, 21 bp, Homo sapiens
tctggtgtaayggggatgtaa

SEQ ID NO: 15909 - DNA, 21 bp, Homo sapiens
tgtagatcttstggaattaga

SEQ ID NO: 15910 - DNA, 21 bp, Homo sapiens
tacctcctttycttaatgact

SEQ ID NO: 15911 - DNA, 21 bp, Homo sapiens
tgaacctggcytatcaaaaca

SEQ ID NO: 15912 - DNA, 21 bp, Homo sapiens
ttagtttttcrtattccaaaa

SEQ ID NO: 15913 - DNA, 21 bp, Homo sapiens
ttcctaccacrtattgaaaat

SEQ ID NO: 15914 - DNA, 21 bp, Homo sapiens
ggcatcgactsattttagcct

SEQ ID NO: 15915 - DNA, 21 bp, Homo sapiens
agatttacaartaagcacagc

SEQ ID NO: 15916 - DNA, 21 bp, Homo sapiens
gaaaaccctgrattttgggca

SEQ ID NO: 15917 - DNA, 21 bp, Homo sapiens
gaagaggaagytctttatgta

SEQ ID NO: 15918 - DNA, 21 bp, Homo sapiens
ctgcctagttsctcacccaaa

SEQ ID NO: 15919 - DNA, 21 bp, Homo sapiens
attattgtatrgtgcttacaa

SEQ ID NO: 15920 - DNA, 21 bp, Homo sapiens
tccaacatcaytgcagttaac

SEQ ID NO: 15921 - DNA, 21 bp, Homo sapiens
atctcaagtcyggcatattgc

SEQ ID NO: 15922 - DNA, 21 bp, Homo sapiens
taatatcatcrgcgttaacaa

SEQ ID NO: 15923 - DNA, 21 bp, Homo sapiens
agcttacgccrcctacccttc

SEQ ID NO: 15924 - DNA, 21 bp, Homo sapiens
tccaggttgcyttgacagtgt

SEQ ID NO: 15925 - DNA, 21 bp, Homo sapiens
cctctttagayaacccacctg

SEQ ID NO: 15926 - DNA, 21 bp, Homo sapiens
gttttcaaacytgatttctta

SEQ ID NO: 15927 - DNA, 21 bp, Homo sapiens
cactgcatgarttttcttttc

SEQ ID NO: 15928 - DNA, 21 bp, Homo sapiens
cagagcatcargttggaaaat

SEQ ID NO: 15929 - DNA, 21 bp, Homo sapiens
ttcctcaactstacttatctg

SEQ ID NO: 15930 - DNA, 21 bp, Homo sapiens
atggaagcacmattatttccc

SEQ ID NO: 15931 - DNA, 21 bp, Homo sapiens
agctttcacasctccacatct

SEQ ID NO: 15932 - DNA, 21 bp, Homo sapiens
atctaaaaacsgtattttggt

SEQ ID NO: 15933 - DNA, 21 bp, Homo sapiens
aggtttgcagrgacagcgaca

SEQ ID NO: 15934 - DNA, 21 bp, Homo sapiens
taaaaccatcrtaagtttggg

SEQ ID NO: 15935 - DNA, 21 bp, Homo sapiens
gagcaaatatyttctttttac

SEQ ID NO: 15936 - DNA, 21 bp, Homo sapiens
tcacttgtacraacttttctc

SEQ ID NO: 15937 - DNA, 21 bp, Homo sapiens
agtctacgctrtattaaaagt

SEQ ID NO: 15938 - DNA, 21 bp, Homo sapiens
cattcaaccarttctgttggt

SEQ ID NO: 15939 - DNA, 21 bp, Homo sapiens
agaaaggcagrtctcctggtt

SEQ ID NO: 15940 - DNA, 21 bp, Homo sapiens
cactagccacyagaaagggtg

SEQ ID NO: 15941 - DNA, 21 bp, Homo sapiens
tctgcaatgtrccttttttca

SEQ ID NO: 15942 - DNA, 21 bp, Homo sapiens
ttcgcacccastacgcatgcg

SEQ ID NO: 15943 - DNA, 21 bp, Homo sapiens
tttactgtttrtcaaaaagga

SEQ ID NO: 15944 - DNA, 21 bp, Homo sapiens
ataattttgtygttctgatat

SEQ ID NO: 15945 - DNA, 21 bp, Homo sapiens
gcagaaattayggtttattgt

SEQ ID NO: 15946 - DNA, 21 bp, Homo sapiens
ctattgtaacytctgaaaggc

SEQ ID NO: 15947 - DNA, 21 bp, Homo sapiens
gcagggcccartgacatgcat

SEQ ID NO: 15948 - DNA, 21 bp, Homo sapiens
aaggcagatgrtataagaata

SEQ ID NO: 15949 - DNA, 21 bp, Homo sapiens
cttaactacakctgcatgaac

SEQ ID NO: 15950 - DNA, 21 bp, Homo sapiens
ttgttattgasatggtgtgtg

SEQ ID NO: 15951 - DNA, 21 bp, Homo sapiens
aagtacatacragttgagtat

SEQ ID NO: 15952 - DNA, 21 bp, Homo sapiens
cagatgacaaytgactattaa

SEQ ID NO: 15953 - DNA, 21 bp, Homo sapiens
gcatctccaayaaaatacaag

SEQ ID NO: 15954 - DNA, 21 bp, Homo sapiens
atggatattamcagaaaaata

SEQ ID NO: 15955 - DNA, 21 bp, Homo sapiens
cctgagattgkgatgtaagat

SEQ ID NO: 15956 - DNA, 21 bp, Homo sapiens
agtaattgccrttgaggaaag

SEQ ID NO: 15957 - DNA, 21 bp, Homo sapiens
tcatgttctgytggcccatta

SEQ ID NO: 15958 - DNA, 21 bp, Homo sapiens
gtacttgtggmtcttttgtac

SEQ ID NO: 15959 - DNA, 21 bp, Homo sapiens
gttacttctargcaccttcag

SEQ ID NO: 15960 - DNA, 21 bp, Homo sapiens
cgggaccccartgattatttc

SEQ ID NO: 15961 - DNA, 21 bp, Homo sapiens
atggaaccaaytgcacaataa

SEQ ID NO: 15962 - DNA, 21 bp, Homo sapiens
ttcatggttawatcccacatc

SEQ ID NO: 15963 - DNA, 21 bp, Homo sapiens
agtttcaaatrtaattccttc

SEQ ID NO: 15964 - DNA, 21 bp, Homo sapiens
tgtgcatgtcrttttttcaac

SEQ ID NO: 15965 - DNA, 21 bp, Homo sapiens
tcggttaatcraatgcagtgt

SEQ ID NO: 15966 - DNA, 21 bp, Homo sapiens
gcagagattawcacagctttg

SEQ ID NO: 15967 - DNA, 21 bp, Homo sapiens
ttgaattggcmtggacagccc

SEQ ID NO: 15968 - DNA, 21 bp, Homo sapiens
gctacacaatsatgggccacg

SEQ ID NO: 15969 - DNA, 21 bp, Homo sapiens
tatgaacattkgttgaatcag

SEQ ID NO: 15970 - DNA, 21 bp, Homo sapiens
gagtcactcartgtgggtgaa

SEQ ID NO: 15971 - DNA, 21 bp, Homo sapiens
ttcatctcagyaatagatagc

SEQ ID NO: 15972 - DNA, 21 bp, Homo sapiens
gtgtcttcagytgccttcgca

SEQ ID NO: 15973 - DNA, 21 bp, Homo sapiens
ttaagcctctycctagctcat

SEQ ID NO: 15974 - DNA, 21 bp, Homo sapiens
ttctgaataamctcccaattc

SEQ ID NO: 15975 - DNA, 21 bp, Homo sapiens
aagggatcttyattgtcattt

SEQ ID NO: 15976 - DNA, 21 bp, Homo sapiens
attcaaaagtktctatgaagt

SEQ ID NO: 15977 - DNA, 21 bp, Homo sapiens
ccatcaatgcrtctctgcttt

SEQ ID NO: 15978 - DNA, 21 bp, Homo sapiens
aaagggctgcycctccatgct

SEQ ID NO: 15979 - DNA, 21 bp, Homo sapiens
ctaagggagtsccataacgtg

SEQ ID NO: 15980 - DNA, 21 bp, Homo sapiens
gaacttgttgrtaaagtccat

SEQ ID NO: 15981 - DNA, 21 bp, Homo sapiens
gtgggagctaraaatgtacct

SEQ ID NO: 15982 - DNA, 21 bp, Homo sapiens
attaaggtctytacattcaag

SEQ ID NO: 15983 - DNA, 21 bp, Homo sapiens
gcacagtcccrgaatgaaaat

SEQ ID NO: 15984 - DNA, 21 bp, Homo sapiens
gcacaaactcrggatattttt

SEQ ID NO: 15985 - DNA, 21 bp, Homo sapiens
agcttgaaatrttactttgtg

SEQ ID NO: 15986 - DNA, 21 bp, Homo sapiens
tgagaaggaaygggcatcctc

SEQ ID NO: 15987 - DNA, 21 bp, Homo sapiens
ttttagtgcarctggggctct

SEQ ID NO: 15988 - DNA, 21 bp, Homo sapiens
tgctgttgacrttgagatact

SEQ ID NO: 15989 - DNA, 21 bp, Homo sapiens
tgttattgtgrtgggtaagca

SEQ ID NO: 15990 - DNA, 21 bp, Homo sapiens
gggcccacagmttgaagagtt

SEQ ID NO: 15991 - DNA, 21 bp, Homo sapiens
agcaccaactstggcaattta

SEQ ID NO: 15992 - DNA, 21 bp, Homo sapiens
ttgccccttcytgtaactatg

SEQ ID NO: 15993 - DNA, 21 bp, Homo sapiens
catgcgacacscatcacgtcc

SEQ ID NO: 15994 - DNA, 21 bp, Homo sapiens
attcctaagcractctctgaa

SEQ ID NO: 15995 - DNA, 21 bp, Homo sapiens
agtggtaaccyctccttcacg

SEQ ID NO: 15996 - DNA, 21 bp, Homo sapiens
actcagaatgmagtcctcaaa

SEQ ID NO: 15997 - DNA, 21 bp, Homo sapiens
gggtccatacrgcgttctgga

SEQ ID NO: 15998 - DNA, 21 bp, Homo sapiens
ggagactccascccaccccac

SEQ ID NO: 15999 - DNA, 21 bp, Homo sapiens
acatgttctgraatttgatct

SEQ ID NO: 16000 - DNA, 21 bp, Homo sapiens
gtaaacagttkccttagttgt

SEQ ID NO: 16001 - DNA, 21 bp, Homo sapiens
acatttcaggratttaaaggg

SEQ ID NO: 16002 - DNA, 21 bp, Homo sapiens
tgaataaagcraggttgattc

SEQ ID NO: 16003 - DNA, 21 bp, Homo sapiens
caatgagctgygcgcggttgc

SEQ ID NO: 16004 - DNA, 21 bp, Homo sapiens
taactttgcargaccagaaca

SEQ ID NO: 16005 - DNA, 21 bp, Homo sapiens
agtaaaatacrtccccgtgta

SEQ ID NO: 16006 - DNA, 21 bp, Homo sapiens
agtatacttayacaatcctag

SEQ ID NO: 16007 - DNA, 21 bp, Homo sapiens
gatccacccamgaatgatagc

SEQ ID NO: 16008 - DNA, 21 bp, Homo sapiens
gtaagctaggkagtgggatat

SEQ ID NO: 16009 - DNA, 21 bp, Homo sapiens
agcccgggtasttttgttgta

SEQ ID NO: 16010 - DNA, 21 bp, Homo sapiens
attgttcagtrgaggaataaa

SEQ ID NO: 16011 - DNA, 21 bp, Homo sapiens
ttacagatcarcttctagata

SEQ ID NO: 16012 - DNA, 21 bp, Homo sapiens
aatgcaatgcmtattaaaggc

SEQ ID NO: 16013 - DNA, 21 bp, Homo sapiens
cctaactaaaygagtgagcat

SEQ ID NO: 16014 - DNA, 21 bp, Homo sapiens
ttgttgttgcycaaatgtagg

SEQ ID NO: 16015 - DNA, 21 bp, Homo sapiens
accccttgagytacagggaga

SEQ ID NO: 16016 - DNA, 21 bp, Homo sapiens
atgtgcagatrcatgcttcac

SEQ ID NO: 16017 - DNA, 21 bp, Homo sapiens
gatttttgacrcttgcgttat

SEQ ID NO: 16018 - DNA, 21 bp, Homo sapiens
tgaaaaatctyggggtaaaag

SEQ ID NO: 16019 - DNA, 21 bp, Homo sapiens
ctagaacagaytgtgaacagg

SEQ ID NO: 16020 - DNA, 21 bp, Homo sapiens
gatatggagastttagctgtc

SEQ ID NO: 16021 - DNA, 21 bp, Homo sapiens
ctgatcttagyttggaagtgg

SEQ ID NO: 16022 - DNA, 21 bp, Homo sapiens
agattttcccyggagaggtgg

SEQ ID NO: 16023 - DNA, 21 bp, Homo sapiens
aaagccattcrcaggctcgcc

SEQ ID NO: 16024 - DNA, 21 bp, Homo sapiens
tggggtccagsaaggtcacgt

SEQ ID NO: 16025 - DNA, 21 bp, Homo sapiens
cccgtaccacyttggcagtct

SEQ ID NO: 16026 - DNA, 21 bp, Homo sapiens
acacggtaagrttctgtgtta

SEQ ID NO: 16027 - DNA, 21 bp, Homo sapiens
ccaacctgttrtcaagcccca

SEQ ID NO: 16028 - DNA, 21 bp, Homo sapiens
ggaatctgaaygcgcttgcca

SEQ ID NO: 16029 - DNA, 21 bp, Homo sapiens
gtacaaaaatrcatggcttca

SEQ ID NO: 16030 - DNA, 21 bp, Homo sapiens
gtcatcccagmaaaacattcc

SEQ ID NO: 16031 - DNA, 21 bp, Homo sapiens
aagatatcacrttttaccttt

SEQ ID NO: 16032 - DNA, 21 bp, Homo sapiens
aagaactcagmaccagaaaga

SEQ ID NO: 16033 - DNA, 21 bp, Homo sapiens
tcctcacagaygttgaatggc

SEQ ID NO: 16034 - DNA, 21 bp, Homo sapiens
gtaagtgtttscttcgttaca

SEQ ID NO: 16035 - DNA, 21 bp, Homo sapiens
aacgactgaamaataaagagg

SEQ ID NO: 16036 - DNA, 21 bp, Homo sapiens
ttgagtgagcrgacagcccag

SEQ ID NO: 16037 - DNA, 21 bp, Homo sapiens
ctgggggtgtrcattggcaat

SEQ ID NO: 16038 - DNA, 21 bp, Homo sapiens
acagcagagawcaacaaaact

SEQ ID NO: 16039 - DNA, 21 bp, Homo sapiens
tagagcccacrcacagggaaa

SEQ ID NO: 16040 - DNA, 21 bp, Homo sapiens
gcagtggtcaytcatgaaata

SEQ ID NO: 16041 - DNA, 21 bp, Homo sapiens
tgttatgctcrgtgcatagtt

SEQ ID NO: 16042 - DNA, 21 bp, Homo sapiens
gactttgatcrtatcattgct

SEQ ID NO: 16043 - DNA, 21 bp, Homo sapiens
gcatgctgtcmttttcaacct

SEQ ID NO: 16044 - DNA, 21 bp, Homo sapiens
ctgaatagaaygaagacgaaa

SEQ ID NO: 16045 - DNA, 21 bp, Homo sapiens
aaaacaaaagrtatcatggta

SEQ ID NO: 16046 - DNA, 21 bp, Homo sapiens
atgaaacataraaagaaatag

SEQ ID NO: 16047 - DNA, 21 bp, Homo sapiens
ggcaattgctwtcaggtactg

SEQ ID NO: 16048 - DNA, 21 bp, Homo sapiens
tgctgcaccgyctacgattac

SEQ ID NO: 16049 - DNA, 21 bp, Homo sapiens
atcagttactyttactatcag

SEQ ID NO: 16050 - DNA, 21 bp, Homo sapiens
aattataactyaccaataatg

SEQ ID NO: 16051 - DNA, 21 bp, Homo sapiens
ggtctactccrtgcaatacta

SEQ ID NO: 16052 - DNA, 21 bp, Homo sapiens
ggcttgacctraggttttcaa

SEQ ID NO: 16053 - DNA, 21 bp, Homo sapiens
agcattaatgrcctttataaa

SEQ ID NO: 16054 - DNA, 21 bp, Homo sapiens
ctttgagcccwtgtggccagt

SEQ ID NO: 16055 - DNA, 21 bp, Homo sapiens
gagctgtttckgtttaattcc

SEQ ID NO: 16056 - DNA, 21 bp, Homo sapiens
cattaagacaktgaaaggtga

SEQ ID NO: 16057 - DNA, 21 bp, Homo sapiens
agacctgcacrctgggcttgt

SEQ ID NO: 16058 - DNA, 21 bp, Homo sapiens
atccagttcasagtctgattg

SEQ ID NO: 16059 - DNA, 21 bp, Homo sapiens
cactcctaagrgtacccacat

SEQ ID NO: 16060 - DNA, 21 bp, Homo sapiens
tttgcttaggrcagtttgctt

SEQ ID NO: 16061 - DNA, 21 bp, Homo sapiens
aacaaaaagaratttagcctt

SEQ ID NO: 16062 - DNA, 21 bp, Homo sapiens
ccaacaccatktgagagtacc

SEQ ID NO: 16063 - DNA, 21 bp, Homo sapiens
tcaatatcttwtattagccaa

SEQ ID NO: 16064 - DNA, 21 bp, Homo sapiens
ttaagtacccyggcttgtttt

SEQ ID NO: 16065 - DNA, 21 bp, Homo sapiens
acattcttttytttcctggtt

SEQ ID NO: 16066 - DNA, 21 bp, Homo sapiens
ccaaaagggtrtatctgtcca

SEQ ID NO: 16067 - DNA, 21 bp, Homo sapiens
tgtttagtatrtgcttgaaat

SEQ ID NO: 16068 - DNA, 21 bp, Homo sapiens
tagtctctgtytcccagttat

SEQ ID NO: 16069 - DNA, 21 bp, Homo sapiens
aattgattcaragcactacca

SEQ ID NO: 16070 - DNA, 21 bp, Homo sapiens
ttgttgggcaygtcagctctt

SEQ ID NO: 16071 - DNA, 21 bp, Homo sapiens
tggttgaaacrtagtgtctac

SEQ ID NO: 16072 - DNA, 21 bp, Homo sapiens
atcgtaacagkactcatgaag

SEQ ID NO: 16073 - DNA, 21 bp, Homo sapiens
tgaggtgctgygctctcgctg

SEQ ID NO: 16074 - DNA, 21 bp, Homo sapiens
ttagtatttcrtggatgacat

SEQ ID NO: 16075 - DNA, 21 bp, Homo sapiens
ctttggggatyttcctaacct

SEQ ID NO: 16076 - DNA, 21 bp, Homo sapiens
tcattgatgcrgacaggtaag

SEQ ID NO: 16077 - DNA, 21 bp, Homo sapiens
gttgaacatgrtcttgacctc

SEQ ID NO: 16078 - DNA, 21 bp, Homo sapiens
ggaactgtctyaagtgccttc

SEQ ID NO: 16079 - DNA, 21 bp, Homo sapiens
tgactgaatayggaaaaggta

SEQ ID NO: 16080 - DNA, 21 bp, Homo sapiens
ccattgtgccmggaagctttt

SEQ ID NO: 16081 - DNA, 21 bp, Homo sapiens
attggtagccraggaaaccag

SEQ ID NO: 16082 - DNA, 21 bp, Homo sapiens
tttccacaaaycagttgaagt

SEQ ID NO: 16083 - DNA, 21 bp, Homo sapiens
gcaatacagcstacatttatt

SEQ ID NO: 16084 - DNA, 21 bp, Homo sapiens
acatggaatcrgaaacctttg

SEQ ID NO: 16085 - DNA, 21 bp, Homo sapiens
ttctttcaggrtatgtagaaa

SEQ ID NO: 16086 - DNA, 21 bp, Homo sapiens
ttgctcaattrctcttcatgt

SEQ ID NO: 16087 - DNA, 21 bp, Homo sapiens
attatgtatgyatcaccaggt

SEQ ID NO: 16088 - DNA, 21 bp, Homo sapiens
cagaaaaggtyactgttgact

SEQ ID NO: 16089 - DNA, 21 bp, Homo sapiens
tctatgaactwcagcatctct

SEQ ID NO: 16090 - DNA, 21 bp, Homo sapiens
ctgttgataargaattggtct

SEQ ID NO: 16091 - DNA, 21 bp, Homo sapiens
ttcaaagtgtygtaagagcta

SEQ ID NO: 16092 - DNA, 21 bp, Homo sapiens
tgcaaaagacyttccttgggc

SEQ ID NO: 16093 - DNA, 21 bp, Homo sapiens
gcaatatagtwactgctacag

SEQ ID NO: 16094 - DNA, 21 bp, Homo sapiens
acgaggttccraaatgcacca

SEQ ID NO: 16095 - DNA, 21 bp, Homo sapiens
gagcttgttcrcaacaccagc

SEQ ID NO: 16096 - DNA, 21 bp, Homo sapiens
taaaacaatcyttcttgtcct

SEQ ID NO: 16097 - DNA, 21 bp, Homo sapiens
ggctgcttacytagtctcctt

SEQ ID NO: 16098 - DNA, 21 bp, Homo sapiens
tgaataataawgcataaatag

SEQ ID NO: 16099 - DNA, 21 bp, Homo sapiens
aggtcatttgrtggttcacca

SEQ ID NO: 16100 - DNA, 21 bp, Homo sapiens
agaacccatgmgtataggtct

SEQ ID NO: 16101 - DNA, 21 bp, Homo sapiens
catatactccrcccaccagag

SEQ ID NO: 16102 - DNA, 21 bp, Homo sapiens
taccctactaygggcttcagt

SEQ ID NO: 16103 - DNA, 21 bp, Homo sapiens
accaaagaggycctcgttggg

SEQ ID NO: 16104 - DNA, 21 bp, Homo sapiens
gacaatactayatatgcaata

SEQ ID NO: 16105 - DNA, 21 bp, Homo sapiens
tgcattttctraaagtatatt

SEQ ID NO: 16106 - DNA, 21 bp, Homo sapiens
ttttctgttgmtttacacggg

SEQ ID NO: 16107 - DNA, 21 bp, Homo sapiens
tctcgttggcrtttttcctag

SEQ ID NO: 16108 - DNA, 21 bp, Homo sapiens
gtactacgccytctgttttta

SEQ ID NO: 16109 - DNA, 21 bp, Homo sapiens
gaaaaagaccrcaagaccagg

SEQ ID NO: 16110 - DNA, 21 bp, Homo sapiens
caaatatacakcttccatttt

SEQ ID NO: 16111 - DNA, 21 bp, Homo sapiens
cgcccaagaamgtttgaagcc

SEQ ID NO: 16112 - DNA, 21 bp, Homo sapiens
cctcctgtgtygtaaagaatg

SEQ ID NO: 16113 - DNA, 21 bp, Homo sapiens
ttatgccagaygagacatagt

SEQ ID NO: 16114 - DNA, 21 bp, Homo sapiens
taagcaacagscttactggtc

SEQ ID NO: 16115 - DNA, 21 bp, Homo sapiens
aagtggctttmtccaattgtg

SEQ ID NO: 16116 - DNA, 21 bp, Homo sapiens
tccctaaaggyggggttctcc

SEQ ID NO: 16117 - DNA, 21 bp, Homo sapiens
tgatagtaaamgtttccttgg

SEQ ID NO: 16118 - DNA, 21 bp, Homo sapiens
caagacagcgygtgcatcgca

SEQ ID NO: 16119 - DNA, 21 bp, Homo sapiens
actctcacttycatttcagat

SEQ ID NO: 16120 - DNA, 21 bp, Homo sapiens
gcaatgcctgstcatttacat

SEQ ID NO: 16121 - DNA, 21 bp, Homo sapiens
tactggactayaccttagtgc

SEQ ID NO: 16122 - DNA, 21 bp, Homo sapiens
ttaagaaactkcctactgatc

SEQ ID NO: 16123 - DNA, 21 bp, Homo sapiens
cttccaatctrtcctttggca

SEQ ID NO: 16124 - DNA, 21 bp, Homo sapiens
gataaaaattmaatgattccg

SEQ ID NO: 16125 - DNA, 21 bp, Homo sapiens
tgaagtaaagmtattgaggaa

SEQ ID NO: 16126 - DNA, 21 bp, Homo sapiens
tctagaaagcyggaaatggga

SEQ ID NO: 16127 - DNA, 21 bp, Homo sapiens
aaagtgttgayagttttagaa

SEQ ID NO: 16128 - DNA, 21 bp, Homo sapiens
ttaggtaagtytgtgcaatga

SEQ ID NO: 16129 - DNA, 21 bp, Homo sapiens
gttaatatccmacacaagatc

SEQ ID NO: 16130 - DNA, 21 bp, Homo sapiens
tgattttccartttgcttaag

SEQ ID NO: 16131 - DNA, 21 bp, Homo sapiens
cagctttagaractaaatcat

SEQ ID NO: 16132 - DNA, 21 bp, Homo sapiens
aaatggtgaayctgtcaacgg

SEQ ID NO: 16133 - DNA, 21 bp, Homo sapiens
acctctggaasaacatgagct

SEQ ID NO: 16134 - DNA, 21 bp, Homo sapiens
cagtgttagcygtgattacca

SEQ ID NO: 16135 - DNA, 21 bp, Homo sapiens
taggttttgtrggcgtatctc

SEQ ID NO: 16136 - DNA, 21 bp, Homo sapiens
tatgagctgargccttcacag

SEQ ID NO: 16137 - DNA, 21 bp, Homo sapiens
aagcacagagrcggtctataa

SEQ ID NO: 16138 - DNA, 21 bp, Homo sapiens
atgttttatamctgtcattac

SEQ ID NO: 16139 - DNA, 21 bp, Homo sapiens
agttctccacmaagagaaatg

SEQ ID NO: 16140 - DNA, 21 bp, Homo sapiens
tagaataacargcccaaagcg

SEQ ID NO: 16141 - DNA, 21 bp, Homo sapiens
attttttaatmtgcaaactcc

SEQ ID NO: 16142 - DNA, 21 bp, Homo sapiens
atttgtgtttyatatccccct

SEQ ID NO: 16143 - DNA, 21 bp, Homo sapiens
aatgtagtttsagtttgataa

SEQ ID NO: 16144 - DNA, 21 bp, Homo sapiens
atgtactcacrggttgaaacc

SEQ ID NO: 16145 - DNA, 21 bp, Homo sapiens
tctctttaagrttgtccatgt

SEQ ID NO: 16146 - DNA, 21 bp, Homo sapiens
ttgggtgctcycctttttaga

SEQ ID NO: 16147 - DNA, 21 bp, Homo sapiens
ctcggggccawtgcagtatcc

SEQ ID NO: 16148 - DNA, 21 bp, Homo sapiens
ggtgctctgtyacactctgag

SEQ ID NO: 16149 - DNA, 21 bp, Homo sapiens
aggtgagcaaygctgactatc

SEQ ID NO: 16150 - DNA, 21 bp, Homo sapiens
agtcctacatygctacaaata

SEQ ID NO: 16151 - DNA, 21 bp, Homo sapiens
aagaaatcagygatccagatg

SEQ ID NO: 16152 - DNA, 21 bp, Homo sapiens
cagactagacrttcaaaaatc

SEQ ID NO: 16153 - DNA, 21 bp, Homo sapiens
aaactccatgrtttgatttga

SEQ ID NO: 16154 - DNA, 21 bp, Homo sapiens
ctttaaaacaygttgtataac

SEQ ID NO: 16155 - DNA, 21 bp, Homo sapiens
tatcaaataawgaccgataga

SEQ ID NO: 16156 - DNA, 21 bp, Homo sapiens
acctgttaatrtctactcttg

SEQ ID NO: 16157 - DNA, 21 bp, Homo sapiens
acaagtatgartagaacacac

SEQ ID NO: 16158 - DNA, 21 bp, Homo sapiens
attatagtggrctagaagctc

SEQ ID NO: 16159 - DNA, 21 bp, Homo sapiens
aagcaaaggtrccctgacata

SEQ ID NO: 16160 - DNA, 21 bp, Homo sapiens
gcagcattccygaagctaaga

SEQ ID NO: 16161 - DNA, 21 bp, Homo sapiens
ctctctttcarttttttgtta

SEQ ID NO: 16162 - DNA, 21 bp, Homo sapiens
agtatttgcaygaattgaagg

SEQ ID NO: 16163 - DNA, 21 bp, Homo sapiens
aattaactttytatcgtagct

SEQ ID NO: 16164 - DNA, 21 bp, Homo sapiens
tcttacaatawaaatcagagt

SEQ ID NO: 16165 - DNA, 21 bp, Homo sapiens
cttggggaaamtgcatgagtt

SEQ ID NO: 16166 - DNA, 21 bp, Homo sapiens
tctttaaggcyatctggaagc

SEQ ID NO: 16167 - DNA, 21 bp, Homo sapiens
tgctgccacayagcttttgat

SEQ ID NO: 16168 - DNA, 21 bp, Homo sapiens
actagtttttrgcaaagtttg

SEQ ID NO: 16169 - DNA, 21 bp, Homo sapiens
aatttccattkgatgggagga

SEQ ID NO: 16170 - DNA, 21 bp, Homo sapiens
tttagccaaastcactctgtt

SEQ ID NO: 16171 - DNA, 21 bp, Homo sapiens
taaatgtgcamtgttcatgaa

SEQ ID NO: 16172 - DNA, 21 bp, Homo sapiens
tgaatatagckttcacacaaa

SEQ ID NO: 16173 - DNA, 21 bp, Homo sapiens
tattcatggaygtaccccaat

SEQ ID NO: 16174 - DNA, 21 bp, Homo sapiens
aagacgatgarcttcttgaag

SEQ ID NO: 16175 - DNA, 21 bp, Homo sapiens
tagagctaackgtagagaaga

SEQ ID NO: 16176 - DNA, 21 bp, Homo sapiens
acatttgttgrgtgcataatt

SEQ ID NO: 16177 - DNA, 21 bp, Homo sapiens
taagtttcackgtgatgtcat

SEQ ID NO: 16178 - DNA, 21 bp, Homo sapiens
cgcccatggcrtcagactaaa

SEQ ID NO: 16179 - DNA, 21 bp, Homo sapiens
aaaaacactcytggagaaata

SEQ ID NO: 16180 - DNA, 21 bp, Homo sapiens
aggaggcatcrttgtgggatg

SEQ ID NO: 16181 - DNA, 21 bp, Homo sapiens
gggcaggtccygaaggtattg

SEQ ID NO: 16182 - DNA, 21 bp, Homo sapiens
gcggcctgcaygcccgcgcct

SEQ ID NO: 16183 - DNA, 21 bp, Homo sapiens
ttgcaacataygcatttacaa

SEQ ID NO: 16184 - DNA, 21 bp, Homo sapiens
ttggaatttargagagctttc

SEQ ID NO: 16185 - DNA, 21 bp, Homo sapiens
gggaaggaacrcccagccttt

SEQ ID NO: 16186 - DNA, 21 bp, Homo sapiens
ggatgctgtgycggccctcaa

SEQ ID NO: 16187 - DNA, 21 bp, Homo sapiens
gaccgttttcyagccatccgt

SEQ ID NO: 16188 - DNA, 21 bp, Homo sapiens
ctgaagctgarcacattgcaa

SEQ ID NO: 16189 - DNA, 21 bp, Homo sapiens
agctctttgtrcaggaaggac

SEQ ID NO: 16190 - DNA, 21 bp, Homo sapiens
ctggttttttwaaattgtttt

SEQ ID NO: 16191 - DNA, 21 bp, Homo sapiens
ctgggtagtgkcagggtccca

SEQ ID NO: 16192 - DNA, 21 bp, Homo sapiens
ctagatccagwgaaaacagta

SEQ ID NO: 16193 - DNA, 21 bp, Homo sapiens
aataatgagcragggtaagcc

SEQ ID NO: 16194 - DNA, 21 bp, Homo sapiens
aaggaaagcasaggcgtcagg

SEQ ID NO: 16195 - DNA, 21 bp, Homo sapiens
tatttgaagaytttatagcag

SEQ ID NO: 16196 - DNA, 21 bp, Homo sapiens
taggcagtgartgtttgaatt

SEQ ID NO: 16197 - DNA, 21 bp, Homo sapiens
taaacataaamgggcagggag

SEQ ID NO: 16198 - DNA, 21 bp, Homo sapiens
tcaggtgtgaragcataaact

SEQ ID NO: 16199 - DNA, 21 bp, Homo sapiens
attgtggtgcrtagtttgagt

SEQ ID NO: 16200 - DNA, 21 bp, Homo sapiens
atgagcttatrttcgagaaaa

SEQ ID NO: 16201 - DNA, 21 bp, Homo sapiens
ctttataaagmaaggtaatgt

SEQ ID NO: 16202 - DNA, 21 bp, Homo sapiens
cacccaggtcraacagactat

SEQ ID NO: 16203 - DNA, 21 bp, Homo sapiens
agtaaacataytgaaatgcta

SEQ ID NO: 16204 - DNA, 21 bp, Homo sapiens
gtgcccagctrtttgtgtctt

SEQ ID NO: 16205 - DNA, 21 bp, Homo sapiens
aacttgcccargttgccacaa

SEQ ID NO: 16206 - DNA, 21 bp, Homo sapiens
agaaaggaatyggatgctcac

SEQ ID NO: 16207 - DNA, 21 bp, Homo sapiens
taccagaaggmaactagtgtg

SEQ ID NO: 16208 - DNA, 21 bp, Homo sapiens
catttggttawttatgacttt

SEQ ID NO: 16209 - DNA, 21 bp, Homo sapiens
tggacattccrcctacatgct

SEQ ID NO: 16210 - DNA, 21 bp, Homo sapiens
taggagaaacsgacttttgat

SEQ ID NO: 16211 - DNA, 21 bp, Homo sapiens
atgtacccacwgataaagggt

SEQ ID NO: 16212 - DNA, 21 bp, Homo sapiens
aaagtatttgsttcacttatg

SEQ ID NO: 16213 - DNA, 21 bp, Homo sapiens
cagagttaaayacacttcaga

SEQ ID NO: 16214 - DNA, 21 bp, Homo sapiens
aagggctaacraggagcttcg

SEQ ID NO: 16215 - DNA, 21 bp, Homo sapiens
cagggaggacrtgagggaacg

SEQ ID NO: 16216 - DNA, 21 bp, Homo sapiens
ggttgatttastgtattttta

SEQ ID NO: 16217 - DNA, 21 bp, Homo sapiens
gaagttctccrgtgctcaaac

SEQ ID NO: 16218 - DNA, 21 bp, Homo sapiens
ttctagacatstcgcaagcaa

SEQ ID NO: 16219 - DNA, 21 bp, Homo sapiens
acatttaaaayaccaaatgcc

SEQ ID NO: 16220 - DNA, 21 bp, Homo sapiens
catttgataarccaggtgcat

SEQ ID NO: 16221 - DNA, 21 bp, Homo sapiens
ctaaagtctartaaggaacac

SEQ ID NO: 16222 - DNA, 21 bp, Homo sapiens
ttgtctaaacyctggctgatg

SEQ ID NO: 16223 - DNA, 21 bp, Homo sapiens
ctcctggactstttaatttgt

SEQ ID NO: 16224 - DNA, 21 bp, Homo sapiens
cctaagaactygcttatgtcc

SEQ ID NO: 16225 - DNA, 21 bp, Homo sapiens
gtgcttttacrttttacgctg

SEQ ID NO: 16226 - DNA, 21 bp, Homo sapiens
actttcctgtrtttctctgca

SEQ ID NO: 16227 - DNA, 21 bp, Homo sapiens
gacatgggccytgggtacggc

SEQ ID NO: 16228 - DNA, 21 bp, Homo sapiens
gtctccagcascaccgttgcg

SEQ ID NO: 16229 - DNA, 21 bp, Homo sapiens
atttcagctgsagactctgaa

SEQ ID NO: 16230 - DNA, 21 bp, Homo sapiens
agccttgtccrggagacccac

SEQ ID NO: 16231 - DNA, 21 bp, Homo sapiens
tataatctgawgggaaaagca

SEQ ID NO: 16232 - DNA, 21 bp, Homo sapiens
gtggaccataytgatcagaag

SEQ ID NO: 16233 - DNA, 21 bp, Homo sapiens
cattcatgacygttaacgtgg

SEQ ID NO: 16234 - DNA, 21 bp, Homo sapiens
agtgcactgcragatgtgtgt

SEQ ID NO: 16235 - DNA, 21 bp, Homo sapiens
gcctccctacrtgcttgcgtg

SEQ ID NO: 16236 - DNA, 21 bp, Homo sapiens
agatttaaggrgtaaagtact

SEQ ID NO: 16237 - DNA, 21 bp, Homo sapiens
tagggaccaascaaagacctc

SEQ ID NO: 16238 - DNA, 21 bp, Homo sapiens
cagttgggacrttgcttctta

SEQ ID NO: 16239 - DNA, 21 bp, Homo sapiens
tagtcccctcktacctggcaa

SEQ ID NO: 16240 - DNA, 21 bp, Homo sapiens
ccctgaagacrcaaattattt

SEQ ID NO: 16241 - DNA, 21 bp, Homo sapiens
tgtcactcatrgatgaatcac

SEQ ID NO: 16242 - DNA, 21 bp, Homo sapiens
agactataacrgagctgaagt

SEQ ID NO: 16243 - DNA, 21 bp, Homo sapiens
tcagtggtatyagatggctca

SEQ ID NO: 16244 - DNA, 21 bp, Homo sapiens
ctttgaatcartgaaagccta

SEQ ID NO: 16245 - DNA, 21 bp, Homo sapiens
attctatacartgtgctgtaa

SEQ ID NO: 16246 - DNA, 21 bp, Homo sapiens
atgtgtccctrtagccccggt

SEQ ID NO: 16247 - DNA, 21 bp, Homo sapiens
ataaatgtatrcatccaatgg

SEQ ID NO: 16248 - DNA, 21 bp, Homo sapiens
agccgtatatkagggttgctc

SEQ ID NO: 16249 - DNA, 21 bp, Homo sapiens
gagaatcaccyattcacagat

SEQ ID NO: 16250 - DNA, 21 bp, Homo sapiens
gagaatcaccyattcacagat

SEQ ID NO: 16251 - DNA, 21 bp, Homo sapiens
gcaatttcatmttgagagttt

SEQ ID NO: 16252 - DNA, 21 bp, Homo sapiens
gcaatttcatmttgagagttt

SEQ ID NO: 16253 - DNA, 21 bp, Homo sapiens
agttttattcmcttttgggac

SEQ ID NO: 16254 - DNA, 21 bp, Homo sapiens
atagagatagrtcattatggt

SEQ ID NO: 16255 - DNA, 21 bp, Homo sapiens
caacaacccartgaggtaggg

SEQ ID NO: 16256 - DNA, 21 bp, Homo sapiens
tgagagcacayttttatttca

SEQ ID NO: 16257 - DNA, 21 bp, Homo sapiens
atcttgctttktaaagaaaat

SEQ ID NO: 16258 - DNA, 21 bp, Homo sapiens
aaatgttatamatagtggcaa

SEQ ID NO: 16259 - DNA, 21 bp, Homo sapiens
gcagaactcaycttcctctag

SEQ ID NO: 16260 - DNA, 21 bp, Homo sapiens
gtaaatttagrcactaccaag

SEQ ID NO: 16261 - DNA, 21 bp, Homo sapiens
atcactaattrgatctctttt

SEQ ID NO: 16262 - DNA, 21 bp, Homo sapiens
tttctgacagkcttttggttc

SEQ ID NO: 16263 - DNA, 21 bp, Homo sapiens
actcgatgaartaaaacaaaa

SEQ ID NO: 16264 - DNA, 21 bp, Homo sapiens
agttaacattmttccagcttc

SEQ ID NO: 16265 - DNA, 21 bp, Homo sapiens
agagagtgcaraggataaaga

SEQ ID NO: 16266 - DNA, 21 bp, Homo sapiens
ttaaacgtgaycaaagtttga

SEQ ID NO: 16267 - DNA, 21 bp, Homo sapiens
aaacggtatastattgatgtg

SEQ ID NO: 16268 - DNA, 21 bp, Homo sapiens
caagtgattcrcaagcgtcac

SEQ ID NO: 16269 - DNA, 21 bp, Homo sapiens
ctgcaaattaygagtgcaaca

SEQ ID NO: 16270 - DNA, 21 bp, Homo sapiens
aactgttaatyataataatac

SEQ ID NO: 16271 - DNA, 21 bp, Homo sapiens
tctgacattgkcctcattaca

SEQ ID NO: 16272 - DNA, 21 bp, Homo sapiens
tctttttcccratgaatgaat

SEQ ID NO: 16273 - DNA, 21 bp, Homo sapiens
aagaaatcacrtattaaataa

SEQ ID NO: 16274 - DNA, 21 bp, Homo sapiens
ttttcaatgcycctatgtgac

SEQ ID NO: 16275 - DNA, 21 bp, Homo sapiens
gtgaaacttcmatttgctatt

SEQ ID NO: 16276 - DNA, 21 bp, Homo sapiens
tctgactcatsattttattcc

SEQ ID NO: 16277 - DNA, 21 bp, Homo sapiens
taagaattggktgcttcttta

SEQ ID NO: 16278 - DNA, 21 bp, Homo sapiens
atgcaacaacrtatcctcctg

SEQ ID NO: 16279 - DNA, 21 bp, Homo sapiens
tttacgaactyctccaggaga

SEQ ID NO: 16280 - DNA, 21 bp, Homo sapiens
tttcaatcaayaactttttat

SEQ ID NO: 16281 - DNA, 21 bp, Homo sapiens
caactggcggyaacgctgggt

SEQ ID NO: 16282 - DNA, 21 bp, Homo sapiens
acatttgcaargtcataataa

SEQ ID NO: 16283 - DNA, 21 bp, Homo sapiens
ggagagtaaaytcattcaccc

SEQ ID NO: 16284 - DNA, 21 bp, Homo sapiens
acaaaggtaargcattaatcc

SEQ ID NO: 16285 - DNA, 21 bp, Homo sapiens
atatttcaagyctgagtgcca

SEQ ID NO: 16286 - DNA, 21 bp, Homo sapiens
atccacacttyaccaaccacc

SEQ ID NO: 16287 - DNA, 21 bp, Homo sapiens
agggagaaaarcctatacaaa

SEQ ID NO: 16288 - DNA, 21 bp, Homo sapiens
atgaacgcttycttccctgct

SEQ ID NO: 16289 - DNA, 21 bp, Homo sapiens
accaagttcartgcttgatcc

SEQ ID NO: 16290 - DNA, 21 bp, Homo sapiens
cgaatccgcgytccccggaaa

SEQ ID NO: 16291 - DNA, 21 bp, Homo sapiens
taacaaccatytgagaaggga

SEQ ID NO: 16292 - DNA, 21 bp, Homo sapiens
ttgtcttcaayagaaatgtca

SEQ ID NO: 16293 - DNA, 21 bp, Homo sapiens
tttagtgctaraaaccaagga

SEQ ID NO: 16294 - DNA, 21 bp, Homo sapiens
gtgattactgrgagggatttt

SEQ ID NO: 16295 - DNA, 21 bp, Homo sapiens
aatgtttatayatatagtgca

SEQ ID NO: 16296 - DNA, 21 bp, Homo sapiens
ctgtgtgaccrtctttcatat

SEQ ID NO: 16297 - DNA, 21 bp, Homo sapiens
ctgacagctcyctcttgaagg

SEQ ID NO: 16298 - DNA, 21 bp, Homo sapiens
gccaagcctgraaatcaaaga

SEQ ID NO: 16299 - DNA, 21 bp, Homo sapiens
atcctagcctyacgctgtact

SEQ ID NO: 16300 - DNA, 21 bp, Homo sapiens
acacagccatyagaagaatat

SEQ ID NO: 16301 - DNA, 21 bp, Homo sapiens
attctgcaaamactagtaata

SEQ ID NO: 16302 - DNA, 21 bp, Homo sapiens
caaagccgaaygcagggatgt

SEQ ID NO: 16303 - DNA, 21 bp, Homo sapiens
ttactgccacrtttatttcat

SEQ ID NO: 16304 - DNA, 21 bp, Homo sapiens
atgaatcaggyggagattatg

SEQ ID NO: 16305 - DNA, 21 bp, Homo sapiens
atgtacactaytgtaaatcta

SEQ ID NO: 16306 - DNA, 21 bp, Homo sapiens
gtcattcaccractttgtttt

SEQ ID NO: 16307 - DNA, 21 bp, Homo sapiens
tccacagggayagaaaactgt

SEQ ID NO: 16308 - DNA, 21 bp, Homo sapiens
ctagaaagctrttttatctat

SEQ ID NO: 16309 - DNA, 21 bp, Homo sapiens
tttcttgaatyaatttccaga

SEQ ID NO: 16310 - DNA, 21 bp, Homo sapiens
tttagtatatygtttccataa

SEQ ID NO: 16311 - DNA, 21 bp, Homo sapiens
gtgccacatakcactagttgg

SEQ ID NO: 16312 - DNA, 21 bp, Homo sapiens
atgaggatccyggaagcttgg

SEQ ID NO: 16313 - DNA, 21 bp, Homo sapiens
ttaggacatamaaatagagga

SEQ ID NO: 16314 - DNA, 21 bp, Homo sapiens
tataacccttraaatttcttc

SEQ ID NO: 16315 - DNA, 21 bp, Homo sapiens
gttgctattcygttgctgaca

SEQ ID NO: 16316 - DNA, 21 bp, Homo sapiens
gtaatccagayctccagcaaa

SEQ ID NO: 16317 - DNA, 21 bp, Homo sapiens
ctgatatgaawgataagggca

SEQ ID NO: 16318 - DNA, 21 bp, Homo sapiens
tgggggctttyaagttcctgt

SEQ ID NO: 16319 - DNA, 21 bp, Homo sapiens
atccaggatcrttgcatcgta

SEQ ID NO: 16320 - DNA, 21 bp, Homo sapiens
tttttcttggytacatccata

SEQ ID NO: 16321 - DNA, 21 bp, Homo sapiens
atgaaaattcrctctcagctg

SEQ ID NO: 16322 - DNA, 21 bp, Homo sapiens
ttgtgcagctstatttaccta

SEQ ID NO: 16323 - DNA, 21 bp, Homo sapiens
tgtttagtacrgatttaagca

SEQ ID NO: 16324 - DNA, 21 bp, Homo sapiens
atgcgtctccrctgtgtttct

SEQ ID NO: 16325 - DNA, 21 bp, Homo sapiens
aaaccaatttrcccaaagtcg

SEQ ID NO: 16326 - DNA, 21 bp, Homo sapiens
cctagatagarttgatatttt

SEQ ID NO: 16327 - DNA, 21 bp, Homo sapiens
aggcattcaarttgcagatcc

SEQ ID NO: 16328 - DNA, 21 bp, Homo sapiens
tgggattattsttcaccagga

SEQ ID NO: 16329 - DNA, 21 bp, Homo sapiens
tgatctgcacrctgtcctgga

SEQ ID NO: 16330 - DNA, 21 bp, Homo sapiens
tctctttgggragttttcttt

SEQ ID NO: 16331 - DNA, 21 bp, Homo sapiens
ctatttccatrcagggcttct

SEQ ID NO: 16332 - DNA, 21 bp, Homo sapiens
gccctgtgtgkacaataatca

SEQ ID NO: 16333 - DNA, 21 bp, Homo sapiens
gaccagtgccrcatgtgctgc

SEQ ID NO: 16334 - DNA, 21 bp, Homo sapiens
ggtccatagamgccaaatgcc

SEQ ID NO: 16335 - DNA, 21 bp, Homo sapiens
taaaaaataastgagcaacct

SEQ ID NO: 16336 - DNA, 21 bp, Homo sapiens
tttgtataaakcaatctgttc

SEQ ID NO: 16337 - DNA, 21 bp, Homo sapiens
ccactcttacygtgttcccgc

SEQ ID NO: 16338 - DNA, 21 bp, Homo sapiens
gaactgactaygcaaaggcat

SEQ ID NO: 16339 - DNA, 21 bp, Homo sapiens
gatgacttttkatgtaatgac

SEQ ID NO: 16340 - DNA, 21 bp, Homo sapiens
ttctgtctttytcccaggttg

SEQ ID NO: 16341 - DNA, 21 bp, Homo sapiens
tacctatcaakcaataatttg

SEQ ID NO: 16342 - DNA, 21 bp, Homo sapiens
aaaactaatgragtgtttgta

SEQ ID NO: 16343 - DNA, 21 bp, Homo sapiens
cgtccctgaartccattctct

SEQ ID NO: 16344 - DNA, 21 bp, Homo sapiens
ttggggtgtcwgtgagagagc

SEQ ID NO: 16345 - DNA, 21 bp, Homo sapiens
gtcataggtgrtttggtagcc

SEQ ID NO: 16346 - DNA, 21 bp, Homo sapiens
actaactatgytgaatgaaag

SEQ ID NO: 16347 - DNA, 21 bp, Homo sapiens
ccactggcagrtatctcctaa

SEQ ID NO: 16348 - DNA, 21 bp, Homo sapiens
tccagagtctrgtacctttat

SEQ ID NO: 16349 - DNA, 21 bp, Homo sapiens
gtaatgttctrgcctctgtgc

SEQ ID NO: 16350 - DNA, 21 bp, Homo sapiens
atccccatgcycaagggtggg

SEQ ID NO: 16351 - DNA, 21 bp, Homo sapiens
ctaagaagaaraggtcatgta

SEQ ID NO: 16352 - DNA, 21 bp, Homo sapiens
ttttaccaatyaacaaacaat

SEQ ID NO: 16353 - DNA, 21 bp, Homo sapiens
tttgcagacayttccctggga

SEQ ID NO: 16354 - DNA, 21 bp, Homo sapiens
ctaaagtacawtaaattctca

SEQ ID NO: 16355 - DNA, 21 bp, Homo sapiens
aatggcatagscttttagtct

SEQ ID NO: 16356 - DNA, 21 bp, Homo sapiens
atgatgcaatmaattatacaa

SEQ ID NO: 16357 - DNA, 21 bp, Homo sapiens
actatggcctkttagaagaaa

SEQ ID NO: 16358 - DNA, 21 bp, Homo sapiens
agagtatagtratgtcattat

SEQ ID NO: 16359 - DNA, 21 bp, Homo sapiens
agttgcatcartaatgaaagc

SEQ ID NO: 16360 - DNA, 21 bp, Homo sapiens
tggttcctttraaaattatcc

SEQ ID NO: 16361 - DNA, 21 bp, Homo sapiens
tagattcccarattggtaaat

SEQ ID NO: 16362 - DNA, 21 bp, Homo sapiens
caccaggtctygctccaacca

SEQ ID NO: 16363 - DNA, 21 bp, Homo sapiens
attggcagtgytgcagatagc

SEQ ID NO: 16364 - DNA, 21 bp, Homo sapiens
gaagctccacrttggctcaga

SEQ ID NO: 16365 - DNA, 21 bp, Homo sapiens
gatgagtaaasttcatttttt

SEQ ID NO: 16366 - DNA, 21 bp, Homo sapiens
tctaaatgttytgcaaagtaa

SEQ ID NO: 16367 - DNA, 21 bp, Homo sapiens
ccaataaaccsttggtgtaaa

SEQ ID NO: 16368 - DNA, 21 bp, Homo sapiens
aaaccaaccawgggtctctca

SEQ ID NO: 16369 - DNA, 21 bp, Homo sapiens
ttgtgtgcagrttctccgcca

SEQ ID NO: 16370 - DNA, 21 bp, Homo sapiens
agtgcctcatkcgcccaaact

SEQ ID NO: 16371 - DNA, 21 bp, Homo sapiens
cctgaacacamacatgaaaaa

SEQ ID NO: 16372 - DNA, 21 bp, Homo sapiens
agagcccctgstccatggccc

SEQ ID NO: 16373 - DNA, 21 bp, Homo sapiens
tttatgctctyaggtgctgac

SEQ ID NO: 16374 - DNA, 21 bp, Homo sapiens
gccaatctctscttcaacaaa

SEQ ID NO: 16375 - DNA, 21 bp, Homo sapiens
gaacccggcastacctctgaa

SEQ ID NO: 16376 - DNA, 21 bp, Homo sapiens
ctgtggtcctygtcgcacacc

SEQ ID NO: 16377 - DNA, 21 bp, Homo sapiens
aaattttatgyaacccacatg

SEQ ID NO: 16378 - DNA, 21 bp, Homo sapiens
actaatacttyatgagctggt

SEQ ID NO: 16379 - DNA, 21 bp, Homo sapiens
aatgccaagcwctcattaata

SEQ ID NO: 16380 - DNA, 21 bp, Homo sapiens
aacaaaaacartatgttgacc

SEQ ID NO: 16381 - DNA, 21 bp, Homo sapiens
taatatactcytgctgtataa

SEQ ID NO: 16382 - DNA, 21 bp, Homo sapiens
aaagaattcawtcggccaggc

SEQ ID NO: 16383 - DNA, 21 bp, Homo sapiens
ctgaggggcartcttcacaca

SEQ ID NO: 16384 - DNA, 21 bp, Homo sapiens
gatgtcctccrgagagtgcag

SEQ ID NO: 16385 - DNA, 21 bp, Homo sapiens
tctttaaccaygccctggcgc

SEQ ID NO: 16386 - DNA, 21 bp, Homo sapiens
gaactgattargccgtggact

SEQ ID NO: 16387 - DNA, 21 bp, Homo sapiens
ttttaaggatygtgtcagata

SEQ ID NO: 16388 - DNA, 21 bp, Homo sapiens
tgccgtagatyaaatgggttt

SEQ ID NO: 16389 - DNA, 21 bp, Homo sapiens
ataaggctatrtatagattgg

SEQ ID NO: 16390 - DNA, 21 bp, Homo sapiens
tttcctctcgmattcatcaat

SEQ ID NO: 16391 - DNA, 21 bp, Homo sapiens
aattcacatayatcttggttt

SEQ ID NO: 16392 - DNA, 21 bp, Homo sapiens
caaacccacaractggaatat

SEQ ID NO: 16393 - DNA, 21 bp, Homo sapiens
attagattttwtaaacatagg

SEQ ID NO: 16394 - DNA, 21 bp, Homo sapiens
agtgaaaaaayaagcaacata

SEQ ID NO: 16395 - DNA, 21 bp, Homo sapiens
agcagcaatcrctttagcatt

SEQ ID NO: 16396 - DNA, 21 bp, Homo sapiens
taccatttctyactgtgaata

SEQ ID NO: 16397 - DNA, 21 bp, Homo sapiens
acttgggacaytggctcaagg

SEQ ID NO: 16398 - DNA, 21 bp, Homo sapiens
tcgttgctgtkgtcttgaata

SEQ ID NO: 16399 - DNA, 21 bp, Homo sapiens
gtgacaacttytggcctttct

SEQ ID NO: 16400 - DNA, 21 bp, Homo sapiens
ggccttggcarctgaacgcct

SEQ ID NO: 16401 - DNA, 21 bp, Homo sapiens
ccgagacagcygctgatgaaa

SEQ ID NO: 16402 - DNA, 21 bp, Homo sapiens
aaaaagggcayggcggccccc

SEQ ID NO: 16403 - DNA, 21 bp, Homo sapiens
gccctcagctsgctccatccc

SEQ ID NO: 16404 - DNA, 21 bp, Homo sapiens
gcctgtctccrcctcagttcc

SEQ ID NO: 16405 - DNA, 21 bp, Homo sapiens
attgtaacagytgtgaaacta

SEQ ID NO: 16406 - DNA, 21 bp, Homo sapiens
agtcattgtaytgggatccct

SEQ ID NO: 16407 - DNA, 21 bp, Homo sapiens
ctcagaaaatrcttatgataa

SEQ ID NO: 16408 - DNA, 21 bp, Homo sapiens
aaacagatcayttaacaagga

SEQ ID NO: 16409 - DNA, 21 bp, Homo sapiens
cctgactatgyggccaatgtc

SEQ ID NO: 16410 - DNA, 21 bp, Homo sapiens
gcaataagccrtgttgcaatg

SEQ ID NO: 16411 - DNA, 21 bp, Homo sapiens
tgcgtccgctsgccgtgtcca

SEQ ID NO: 16412 - DNA, 21 bp, Homo sapiens
ggaaggacttyaaaggtgaac

SEQ ID NO: 16413 - DNA, 21 bp, Homo sapiens
cagtcctggcygcaaagagct

SEQ ID NO: 16414 - DNA, 21 bp, Homo sapiens
atatttctacrcacttccaaa

SEQ ID NO: 16415 - DNA, 21 bp, Homo sapiens
tccatcccagsaagttcccaa

SEQ ID NO: 16416 - DNA, 21 bp, Homo sapiens
attagcctttsctttggtgac

SEQ ID NO: 16417 - DNA, 21 bp, Homo sapiens
ttaataatgayaagaatcagc

SEQ ID NO: 16418 - DNA, 21 bp, Homo sapiens
ttttgctgacrctgttccctc

SEQ ID NO: 16419 - DNA, 21 bp, Homo sapiens
tttgtagcccrtatttctgcc

SEQ ID NO: 16420 - DNA, 21 bp, Homo sapiens
ggcttcccgcrcagcacacct

SEQ ID NO: 16421 - DNA, 21 bp, Homo sapiens
gaattttacayttttatggat

SEQ ID NO: 16422 - DNA, 21 bp, Homo sapiens
ttggtctttcyagttcaagag

SEQ ID NO: 16423 - DNA, 21 bp, Homo sapiens
tgtttccagcrtatgataatc

SEQ ID NO: 16424 - DNA, 21 bp, Homo sapiens
gaagctcagayacaaagttta

SEQ ID NO: 16425 - DNA, 21 bp, Homo sapiens
gacttggaatyactctataaa

SEQ ID NO: 16426 - DNA, 21 bp, Homo sapiens
caaacacaatrgaataccaat

SEQ ID NO: 16427 - DNA, 21 bp, Homo sapiens
agcaggcaatmctcataacag

SEQ ID NO: 16428 - DNA, 21 bp, Homo sapiens
tagatggccamgaggcttccc

SEQ ID NO: 16429 - DNA, 21 bp, Homo sapiens
gccattttacrcaaagaagat

SEQ ID NO: 16430 - DNA, 21 bp, Homo sapiens
aactagccatraagtactccc

SEQ ID NO: 16431 - DNA, 21 bp, Homo sapiens
taataaacacmtagagtcact

SEQ ID NO: 16432 - DNA, 21 bp, Homo sapiens
tgtgcctcacytctggcataa

SEQ ID NO: 16433 - DNA, 21 bp, Homo sapiens
taaaaacacargaatagaaat

SEQ ID NO: 16434 - DNA, 21 bp, Homo sapiens
tcaagaagctytgtagacttg

SEQ ID NO: 16435 - DNA, 21 bp, Homo sapiens
ccacctttgasagtctttttt

SEQ ID NO: 16436 - DNA, 21 bp, Homo sapiens
ccaacaatcayggattaatta

SEQ ID NO: 16437 - DNA, 21 bp, Homo sapiens
taaaagaacayaattcaatac

SEQ ID NO: 16438 - DNA, 21 bp, Homo sapiens
tcactgcttamgaatgagcaa

SEQ ID NO: 16439 - DNA, 21 bp, Homo sapiens
gcctcacttgmaaatgacgag

SEQ ID NO: 16440 - DNA, 21 bp, Homo sapiens
tccacagcccwctaatatatc

SEQ ID NO: 16441 - DNA, 21 bp, Homo sapiens
ccagtgcttgycctggtgctg

SEQ ID NO: 16442 - DNA, 21 bp, Homo sapiens
ttcacccaaakgagatgggat

SEQ ID NO: 16443 - DNA, 21 bp, Homo sapiens
ctgttccagartaaaggttaa

SEQ ID NO: 16444 - DNA, 21 bp, Homo sapiens
taggaagagamgggatcactg

SEQ ID NO: 16445 - DNA, 21 bp, Homo sapiens
aacctgcaatrgaagggccta

SEQ ID NO: 16446 - DNA, 21 bp, Homo sapiens
aaccacggagsgcaagttcaa

SEQ ID NO: 16447 - DNA, 21 bp, Homo sapiens
gattatatttycttgcccttc

SEQ ID NO: 16448 - DNA, 21 bp, Homo sapiens
aaattggtttyctagatggag

SEQ ID NO: 16449 - DNA, 21 bp, Homo sapiens
aaatgcagcasagacctgaca

SEQ ID NO: 16450 - DNA, 21 bp, Homo sapiens
atgtttagttycatattgtac

SEQ ID NO: 16451 - DNA, 21 bp, Homo sapiens
tcacagagacrgatggttgca

SEQ ID NO: 16452 - DNA, 21 bp, Homo sapiens
ctgtgctgggmagtagcgggg

SEQ ID NO: 16453 - DNA, 21 bp, Homo sapiens
ttatcactcgyctccctagtc

SEQ ID NO: 16454 - DNA, 21 bp, Homo sapiens
acacattactratgggcttgt

SEQ ID NO: 16455 - DNA, 21 bp, Homo sapiens
agcattgttgragacagaaaa

SEQ ID NO: 16456 - DNA, 21 bp, Homo sapiens
cttaatttttracaaacctac

SEQ ID NO: 16457 - DNA, 21 bp, Homo sapiens
agaagaataawgagttaagtg

SEQ ID NO: 16458 - DNA, 21 bp, Homo sapiens
cattgcttatktgtgaaagaa

SEQ ID NO: 16459 - DNA, 21 bp, Homo sapiens
tggagtcttarcacaaaaaaa

SEQ ID NO: 16460 - DNA, 21 bp, Homo sapiens
tcataccattraatatcaaat

SEQ ID NO: 16461 - DNA, 21 bp, Homo sapiens
ttcagactttyaagaactggc

SEQ ID NO: 16462 - DNA, 21 bp, Homo sapiens
aatctaaaagragtacacctg

SEQ ID NO: 16463 - DNA, 21 bp, Homo sapiens
aattttacagraaaaaacata

SEQ ID NO: 16464 - DNA, 21 bp, Homo sapiens
cccagaggaastaatttatca

SEQ ID NO: 16465 - DNA, 21 bp, Homo sapiens
ttgaacttctktgcttcagat

SEQ ID NO: 16466 - DNA, 21 bp, Homo sapiens
ccctttaatastaatttcaaa

SEQ ID NO: 16467 - DNA, 21 bp, Homo sapiens
acaatatgagrgccactaaaa

SEQ ID NO: 16468 - DNA, 21 bp, Homo sapiens
agaaaattgargagtttgatt

SEQ ID NO: 16469 - DNA, 21 bp, Homo sapiens
tatcaaggtawgattggagag

SEQ ID NO: 16470 - DNA, 21 bp, Homo sapiens
tataacatatrtagctagtgc

SEQ ID NO: 16471 - DNA, 21 bp, Homo sapiens
ttacttttgtrcgctttccag

SEQ ID NO: 16472 - DNA, 21 bp, Homo sapiens
taatttcagcrtcagtatggc

SEQ ID NO: 16473 - DNA, 21 bp, Homo sapiens
atcttcttgaygaaattttcc

SEQ ID NO: 16474 - DNA, 21 bp, Homo sapiens
tttgtcttgcrgagggtttct

SEQ ID NO: 16475 - DNA, 21 bp, Homo sapiens
aaattttgtgktctgcttata

SEQ ID NO: 16476 - DNA, 21 bp, Homo sapiens
aagtcacctcrtaaaaaaata

SEQ ID NO: 16477 - DNA, 21 bp, Homo sapiens
cctttttgttsttagatataa

SEQ ID NO: 16478 - DNA, 21 bp, Homo sapiens
gatttcatacwatcatctttg

SEQ ID NO: 16479 - DNA, 21 bp, Homo sapiens
ggaatcaaccraaatgagagt

SEQ ID NO: 16480 - DNA, 21 bp, Homo sapiens
cttaaggtggyactactactt

SEQ ID NO: 16481 - DNA, 21 bp, Homo sapiens
tagatgtgaakgattaagatg

SEQ ID NO: 16482 - DNA, 21 bp, Homo sapiens
tttaataagarggcagaggtg

SEQ ID NO: 16483 - DNA, 21 bp, Homo sapiens
gtatgtgtgtrctatggattc

SEQ ID NO: 16484 - DNA, 21 bp, Homo sapiens
attatctacaygcacctctgg

SEQ ID NO: 16485 - DNA, 21 bp, Homo sapiens
tgaaatcaacwctactctaga

SEQ ID NO: 16486 - DNA, 21 bp, Homo sapiens
agcaagtaacrgtgagaggag

SEQ ID NO: 16487 - DNA, 21 bp, Homo sapiens
ttctcctgccstatacaccca

SEQ ID NO: 16488 - DNA, 21 bp, Homo sapiens
tcatttgctgrttattcttat

SEQ ID NO: 16489 - DNA, 21 bp, Homo sapiens
cttggcttccmgtccaggcgg

SEQ ID NO: 16490 - DNA, 21 bp, Homo sapiens
acagcaaatgyttgttgaaaa

SEQ ID NO: 16491 - DNA, 21 bp, Homo sapiens
ctgagcttttraattattgat

SEQ ID NO: 16492 - DNA, 21 bp, Homo sapiens
gcaaattaaastgttactgta

SEQ ID NO: 16493 - DNA, 21 bp, Homo sapiens
gaaataaatasaaaatcatga

SEQ ID NO: 16494 - DNA, 21 bp, Homo sapiens
aactaagtcaygctgctggtc

SEQ ID NO: 16495 - DNA, 21 bp, Homo sapiens
gtcacctccarctaactgtga

SEQ ID NO: 16496 - DNA, 21 bp, Homo sapiens
gaagagaaggytccagctcaa

SEQ ID NO: 16497 - DNA, 21 bp, Homo sapiens
ctcctgcaccygtttgcacga

SEQ ID NO: 16498 - DNA, 21 bp, Homo sapiens
tgcatggagtrccccaaacta

SEQ ID NO: 16499 - DNA, 21 bp, Homo sapiens
caaatggtccrtggagatagg

SEQ ID NO: 16500 - DNA, 21 bp, Homo sapiens
tctgggatccsacctccgggt

SEQ ID NO: 16501 - DNA, 21 bp, Homo sapiens
cagcttcaacraaaatgtacc

SEQ ID NO: 16502 - DNA, 21 bp, Homo sapiens
taataagcagyagccccagct

SEQ ID NO: 16503 - DNA, 21 bp, Homo sapiens
gccaagctcartgcagactgt

SEQ ID NO: 16504 - DNA, 21 bp, Homo sapiens
ttgctgatagyagtgtcctgg

SEQ ID NO: 16505 - DNA, 21 bp, Homo sapiens
tggaggttacrtagtccctga

SEQ ID NO: 16506 - DNA, 21 bp, Homo sapiens
gaaatgggtcragagccaagg

SEQ ID NO: 16507 - DNA, 21 bp, Homo sapiens
tgagttggaastgtttcaggc

SEQ ID NO: 16508 - DNA, 21 bp, Homo sapiens
tactggccagscttcaaggtc

SEQ ID NO: 16509 - DNA, 21 bp, Homo sapiens
ccccgagtttktgaggcaccc

SEQ ID NO: 16510 - DNA, 21 bp, Homo sapiens
tgccacctctraggtccaata

SEQ ID NO: 16511 - DNA, 21 bp, Homo sapiens
cattgtcactycactgctggt

SEQ ID NO: 16512 - DNA, 21 bp, Homo sapiens
agtgactcaayacagggaagc

SEQ ID NO: 16513 - DNA, 21 bp, Homo sapiens
acttttccctyggagcacatt

SEQ ID NO: 16514 - DNA, 21 bp, Homo sapiens
gagatactacragttaatagc

SEQ ID NO: 16515 - DNA, 21 bp, Homo sapiens
acagctgccargtgaaccttc

SEQ ID NO: 16516 - DNA, 21 bp, Homo sapiens
gccttgggagsctcaaaaaaa

SEQ ID NO: 16517 - DNA, 21 bp, Homo sapiens
gtgtgttggaktgtgagctgt

SEQ ID NO: 16518 - DNA, 21 bp, Homo sapiens
tgattgataaytgcttaaaac

SEQ ID NO: 16519 - DNA, 21 bp, Homo sapiens
aatgcatatawaagcacttgg

SEQ ID NO: 16520 - DNA, 21 bp, Homo sapiens
agtgcctgctstgtgtaagaa

SEQ ID NO: 16521 - DNA, 21 bp, Homo sapiens
tggatccctgygtggttaaaa

SEQ ID NO: 16522 - DNA, 21 bp, Homo sapiens
ggcataattamattgatccta

SEQ ID NO: 16523 - DNA, 21 bp, Homo sapiens
aaaggaatttrgccagtgaac

SEQ ID NO: 16524 - DNA, 21 bp, Homo sapiens
tcccgggacarttaagggctc

SEQ ID NO: 16525 - DNA, 21 bp, Homo sapiens
catcctgtccrtttcatagac

SEQ ID NO: 16526 - DNA, 21 bp, Homo sapiens
ggtggcttttyaaacattcag

SEQ ID NO: 16527 - DNA, 21 bp, Homo sapiens
gcccaggagakgtctcacgtt

SEQ ID NO: 16528 - DNA, 21 bp, Homo sapiens
ttcccttcctsatcctgaact

SEQ ID NO: 16529 - DNA, 21 bp, Homo sapiens
tggcggctgtwtagcacaaag

SEQ ID NO: 16530 - DNA, 21 bp, Homo sapiens
aatccatcttrgcctgacttc

SEQ ID NO: 16531 - DNA, 21 bp, Homo sapiens
tcggttgatgygactctatct

SEQ ID NO: 16532 - DNA, 21 bp, Homo sapiens
tctttgttacrctatcctgtg

SEQ ID NO: 16533 - DNA, 21 bp, Homo sapiens
aggtgttcaasctaataacct

SEQ ID NO: 16534 - DNA, 21 bp, Homo sapiens
atttcagaaakattttaatca

SEQ ID NO: 16535 - DNA, 21 bp, Homo sapiens
tcagtctacarcagtctaggt

SEQ ID NO: 16536 - DNA, 21 bp, Homo sapiens
tatcattcagrgtaagtttaa

SEQ ID NO: 16537 - DNA, 21 bp, Homo sapiens
ctttgggattmtaaacagtcc

SEQ ID NO: 16538 - DNA, 21 bp, Homo sapiens
aattgagcagstgctgggtgc

SEQ ID NO: 16539 - DNA, 21 bp, Homo sapiens
acagcaagttmcccaaggaca

SEQ ID NO: 16540 - DNA, 21 bp, Homo sapiens
cttccatgtgmtgggctcaca

SEQ ID NO: 16541 - DNA, 21 bp, Homo sapiens
acccaaggcargtgtactccc

SEQ ID NO: 16542 - DNA, 21 bp, Homo sapiens
cggaaatgaaragagcctatg

SEQ ID NO: 16543 - DNA, 21 bp, Homo sapiens
aatcagccttscaatcagcca

SEQ ID NO: 16544 - DNA, 21 bp, Homo sapiens
agagaactttmaaggaagaag

SEQ ID NO: 16545 - DNA, 21 bp, Homo sapiens
tgctcgataayggattttctt

SEQ ID NO: 16546 - DNA, 21 bp, Homo sapiens
actgaacactyggctgattgt

SEQ ID NO: 16547 - DNA, 21 bp, Homo sapiens
caaattaaacrtatgtgcttt

SEQ ID NO: 16548 - DNA, 21 bp, Homo sapiens
ctaatctggamtaaaaccaca

SEQ ID NO: 16549 - DNA, 21 bp, Homo sapiens
acagagttttwtatcaaatca

SEQ ID NO: 16550 - DNA, 21 bp, Homo sapiens
attatttccarttgtatattt

SEQ ID NO: 16551 - DNA, 21 bp, Homo sapiens
ccaaaagcccygtgggtacaa

SEQ ID NO: 16552 - DNA, 21 bp, Homo sapiens
cagaagaagcrttcaaacaca

SEQ ID NO: 16553 - DNA, 21 bp, Homo sapiens
ctgccacagaycatataatgt

SEQ ID NO: 16554 - DNA, 21 bp, Homo sapiens
tgctcattccycgtttgtata

SEQ ID NO: 16555 - DNA, 21 bp, Homo sapiens
gttcacgaaaygttacaaagg

SEQ ID NO: 16556 - DNA, 21 bp, Homo sapiens
tcaaccaccayttaactactc

SEQ ID NO: 16557 - DNA, 21 bp, Homo sapiens
ataaaaccgastgccacattt

SEQ ID NO: 16558 - DNA, 21 bp, Homo sapiens
tctaatccaaygtcttaggct

SEQ ID NO: 16559 - DNA, 21 bp, Homo sapiens
ccttttacacratttcatata

SEQ ID NO: 16560 - DNA, 21 bp, Homo sapiens
gatcaaagctrttagtaacaa

SEQ ID NO: 16561 - DNA, 21 bp, Homo sapiens
agtggtgacayctggggtgca

SEQ ID NO: 16562 - DNA, 21 bp, Homo sapiens
caaccctggamatttgttgtc

SEQ ID NO: 16563 - DNA, 21 bp, Homo sapiens
ataggtagaargtggtaagat

SEQ ID NO: 16564 - DNA, 21 bp, Homo sapiens
ggaaatgcttsctaaagaagg

SEQ ID NO: 16565 - DNA, 21 bp, Homo sapiens
atattcactgyaggacttacc

SEQ ID NO: 16566 - DNA, 21 bp, Homo sapiens
atcttgaggcwaattcgatga

SEQ ID NO: 16567 - DNA, 21 bp, Homo sapiens
ttatccttctygttttagaaa

SEQ ID NO: 16568 - DNA, 21 bp, Homo sapiens
cctgaatcacrgattggtcat

SEQ ID NO: 16569 - DNA, 21 bp, Homo sapiens
tctctggtgasctccaggtag

SEQ ID NO: 16570 - DNA, 21 bp, Homo sapiens
aataaaacgaygctgtataaa

SEQ ID NO: 16571 - DNA, 21 bp, Homo sapiens
tgggctgggcrcagtgactca

SEQ ID NO: 16572 - DNA, 21 bp, Homo sapiens
tgttcccattsagggatctgt

SEQ ID NO: 16573 - DNA, 21 bp, Homo sapiens
agagccccttrgcctgggagt

SEQ ID NO: 16574 - DNA, 21 bp, Homo sapiens
agactgaaatsaacttggata

SEQ ID NO: 16575 - DNA, 21 bp, Homo sapiens
tactttgcacraggccttgat

SEQ ID NO: 16576 - DNA, 21 bp, Homo sapiens
atcagtcactyacttcttatt

SEQ ID NO: 16577 - DNA, 21 bp, Homo sapiens
cttgcaaagcygactttaatt

SEQ ID NO: 16578 - DNA, 21 bp, Homo sapiens
ttcccttaaaraaacgtagaa

SEQ ID NO: 16579 - DNA, 21 bp, Homo sapiens
agttaccaggraaaatgtcac

SEQ ID NO: 16580 - DNA, 21 bp, Homo sapiens
tgcggtaaaayttacctgttt

SEQ ID NO: 16581 - DNA, 21 bp, Homo sapiens
attacaggaarccgactcagg

SEQ ID NO: 16582 - DNA, 21 bp, Homo sapiens
ccattaggatscttccagact

SEQ ID NO: 16583 - DNA, 21 bp, Homo sapiens
aaccatgaatkctcaaagatt

SEQ ID NO: 16584 - DNA, 21 bp, Homo sapiens
ttctttttcaraattgtgttt

SEQ ID NO: 16585 - DNA, 21 bp, Homo sapiens
gtgggtaaagktctttgaaca

SEQ ID NO: 16586 - DNA, 21 bp, Homo sapiens
aataaaaaaawttcctccaat

SEQ ID NO: 16587 - DNA, 21 bp, Homo sapiens
ctttttatgtrtgaataccag

SEQ ID NO: 16588 - DNA, 21 bp, Homo sapiens
tttttagtggygctcacattt

SEQ ID NO: 16589 - DNA, 21 bp, Homo sapiens
ttgtttctacrataatttatt

SEQ ID NO: 16590 - DNA, 21 bp, Homo sapiens
cggaagttgargactgtgcac

SEQ ID NO: 16591 - DNA, 21 bp, Homo sapiens
tgtgcccagaygacttaacca

SEQ ID NO: 16592 - DNA, 21 bp, Homo sapiens
cactgtttatrcccctctgct

SEQ ID NO: 16593 - DNA, 21 bp, Homo sapiens
tttgttgtccycaaacactga

SEQ ID NO: 16594 - DNA, 21 bp, Homo sapiens
ctctgtgtagmcaaggttagt

SEQ ID NO: 16595 - DNA, 21 bp, Homo sapiens
gttagtggtgrgaaatataag

SEQ ID NO: 16596 - DNA, 21 bp, Homo sapiens
atattaaagcmtataaaattt

SEQ ID NO: 16597 - DNA, 21 bp, Homo sapiens
acttaattttyattgtgtttg

SEQ ID NO: 16598 - DNA, 21 bp, Homo sapiens
ttcccctttarttcaaccttc

SEQ ID NO: 16599 - DNA, 21 bp, Homo sapiens
aaatctaagartgaacttgtg

SEQ ID NO: 16600 - DNA, 21 bp, Homo sapiens
tttttttcttycatgaacaca

SEQ ID NO: 16601 - DNA, 21 bp, Homo sapiens
gctgttcctcrgaaactatgc

SEQ ID NO: 16602 - DNA, 21 bp, Homo sapiens
caaaacaaagrgagaggagat

SEQ ID NO: 16603 - DNA, 21 bp, Homo sapiens
acagtaagccraatataacat

SEQ ID NO: 16604 - DNA, 21 bp, Homo sapiens
attttactttyaaatgacctg

SEQ ID NO: 16605 - DNA, 21 bp, Homo sapiens
ctgggattgayagcccaatgg

SEQ ID NO: 16606 - DNA, 21 bp, Homo sapiens
atgtgaaaagkcgtgagcaac

SEQ ID NO: 16607 - DNA, 21 bp, Homo sapiens
tgaaacccctyaggcctaaag

SEQ ID NO: 16608 - DNA, 21 bp, Homo sapiens
atctcataacyaaacagagtt

SEQ ID NO: 16609 - DNA, 21 bp, Homo sapiens
tttttgctacstgaatttttt

SEQ ID NO: 16610 - DNA, 21 bp, Homo sapiens
ttctctaccayggctggtccc

SEQ ID NO: 16611 - DNA, 21 bp, Homo sapiens
atttttcttcrgttcactttt

SEQ ID NO: 16612 - DNA, 21 bp, Homo sapiens
ctggtagaatygcatgacgat

SEQ ID NO: 16613 - DNA, 21 bp, Homo sapiens
tctatttagcracaaagaact

SEQ ID NO: 16614 - DNA, 21 bp, Homo sapiens
gtcttccttgytgttttgcaa

SEQ ID NO: 16615 - DNA, 21 bp, Homo sapiens
tgctgaacagrcaacaggaac

SEQ ID NO: 16616 - DNA, 21 bp, Homo sapiens
tggagttgatratgttagcat

SEQ ID NO: 16617 - DNA, 21 bp, Homo sapiens
taattggcaargttaggtgct

SEQ ID NO: 16618 - DNA, 21 bp, Homo sapiens
tgtagggaatstaactttttg

SEQ ID NO: 16619 - DNA, 21 bp, Homo sapiens
gagaactaggytaatttcatg

SEQ ID NO: 16620 - DNA, 21 bp, Homo sapiens
tagtcagtgtyagaatcactc

SEQ ID NO: 16621 - DNA, 21 bp, Homo sapiens
gatatttatcractttcccta

SEQ ID NO: 16622 - DNA, 21 bp, Homo sapiens
ctgaaagcatsagcagaacac

SEQ ID NO: 16623 - DNA, 21 bp, Homo sapiens
ctaacaactartatcaccaaa

SEQ ID NO: 16624 - DNA, 21 bp, Homo sapiens
ttcttgccctsaagatcataa

SEQ ID NO: 16625 - DNA, 21 bp, Homo sapiens
ttcttctattyttacttttat

SEQ ID NO: 16626 - DNA, 21 bp, Homo sapiens
ttggaaaaatkgggtttttag

SEQ ID NO: 16627 - DNA, 21 bp, Homo sapiens
gatatcctttrggtaggcggt

SEQ ID NO: 16628 - DNA, 21 bp, Homo sapiens
ttctttcttcrgtttaattcc

SEQ ID NO: 16629 - DNA, 21 bp, Homo sapiens
tgaatggcttwaattcgccag

SEQ ID NO: 16630 - DNA, 21 bp, Homo sapiens
catgacttctyaagtggccct

SEQ ID NO: 16631 - DNA, 21 bp, Homo sapiens
caattttgaasgtgactgcta

SEQ ID NO: 16632 - DNA, 21 bp, Homo sapiens
ctatatttgtrttctaattac

SEQ ID NO: 16633 - DNA, 21 bp, Homo sapiens
ccatcctcccrcttccctctt

SEQ ID NO: 16634 - DNA, 21 bp, Homo sapiens
cagaaggaaaygaataggcct

SEQ ID NO: 16635 - DNA, 21 bp, Homo sapiens
tctgcacgtaytgaggccatt

SEQ ID NO: 16636 - DNA, 21 bp, Homo sapiens
agtgttctagygatattaatt

SEQ ID NO: 16637 - DNA, 21 bp, Homo sapiens
caaggggatcrgacctaggag

SEQ ID NO: 16638 - DNA, 21 bp, Homo sapiens
taaacattggyggataggtgt

SEQ ID NO: 16639 - DNA, 21 bp, Homo sapiens
atacatacttytaaatttaac

SEQ ID NO: 16640 - DNA, 21 bp, Homo sapiens
tattttagtaygccttcaact

SEQ ID NO: 16641 - DNA, 21 bp, Homo sapiens
aggaatctgtrttttagcacc

SEQ ID NO: 16642 - DNA, 21 bp, Homo sapiens
gactcaacccrcctacacatt

SEQ ID NO: 16643 - DNA, 21 bp, Homo sapiens
gggaattcacsaactctagaa

SEQ ID NO: 16644 - DNA, 21 bp, Homo sapiens
atggcgataaygtcagctttc

SEQ ID NO: 16645 - DNA, 21 bp, Homo sapiens
ttccagaggcyatataacctt

SEQ ID NO: 16646 - DNA, 21 bp, Homo sapiens
atatcatttcrtatttgtgaa

SEQ ID NO: 16647 - DNA, 21 bp, Homo sapiens
agtgatgacargagcctagtc

SEQ ID NO: 16648 - DNA, 21 bp, Homo sapiens
tagaagagaaygatttggtga

SEQ ID NO: 16649 - DNA, 21 bp, Homo sapiens
caagactgatkcttagagctt

SEQ ID NO: 16650 - DNA, 21 bp, Homo sapiens
ctgacacttayagccatttaa

SEQ ID NO: 16651 - DNA, 21 bp, Homo sapiens
gcagtaagaayggagaagaga

SEQ ID NO: 16652 - DNA, 21 bp, Homo sapiens
ctgttgccctraagtcgaatg

SEQ ID NO: 16653 - DNA, 21 bp, Homo sapiens
tttgctcccayagaacagtac

SEQ ID NO: 16654 - DNA, 21 bp, Homo sapiens
agttccgtacrtaattgctgt

SEQ ID NO: 16655 - DNA, 21 bp, Homo sapiens
gtttttttgamtctatattct

SEQ ID NO: 16656 - DNA, 21 bp, Homo sapiens
tctctgaaggsattgtttttg

SEQ ID NO: 16657 - DNA, 21 bp, Homo sapiens
atgttagtgartatctccagc

SEQ ID NO: 16658 - DNA, 21 bp, Homo sapiens
gacctttgctytgggactctg

SEQ ID NO: 16659 - DNA, 21 bp, Homo sapiens
tgtcctaggtkgaatcaggat

SEQ ID NO: 16660 - DNA, 21 bp, Homo sapiens
agctgcatttytttgagttca

SEQ ID NO: 16661 - DNA, 21 bp, Homo sapiens
ttggcactcarggaagtcatc

SEQ ID NO: 16662 - DNA, 21 bp, Homo sapiens
ggtttagaggmaacttcagaa

SEQ ID NO: 16663 - DNA, 21 bp, Homo sapiens
tgctccacaarcctcatttct

SEQ ID NO: 16664 - DNA, 21 bp, Homo sapiens
ttatggagtcrgggtccaaga

SEQ ID NO: 16665 - DNA, 21 bp, Homo sapiens
tcagatcccawgatgcagatg

SEQ ID NO: 16666 - DNA, 21 bp, Homo sapiens
cttgaggaccsctttgtaact

SEQ ID NO: 16667 - DNA, 21 bp, Homo sapiens
agtttggcatwcagtgggaca

SEQ ID NO: 16668 - DNA, 21 bp, Homo sapiens
ctgcaatgagyatttggcaga

SEQ ID NO: 16669 - DNA, 21 bp, Homo sapiens
gggcatttttyattctgcatc

SEQ ID NO: 16670 - DNA, 21 bp, Homo sapiens
ctacccctggsaaagtctgat

SEQ ID NO: 16671 - DNA, 21 bp, Homo sapiens
atgacaatgaygcggagggtc

SEQ ID NO: 16672 - DNA, 21 bp, Homo sapiens
ttcaaaggtcrctcagtacag

SEQ ID NO: 16673 - DNA, 21 bp, Homo sapiens
tcaaagaattyaaacttttca

SEQ ID NO: 16674 - DNA, 21 bp, Homo sapiens
tttgtggatcrtgtttttaac

SEQ ID NO: 16675 - DNA, 21 bp, Homo sapiens
tctatagaaaragttgaatcc

SEQ ID NO: 16676 - DNA, 21 bp, Homo sapiens
ctgtaacagawttttcctctg

SEQ ID NO: 16677 - DNA, 21 bp, Homo sapiens
tggacatagargctcccggga

SEQ ID NO: 16678 - DNA, 21 bp, Homo sapiens
acctcacatcrgcaaacagca

SEQ ID NO: 16679 - DNA, 21 bp, Homo sapiens
actgtgcactmatcattacac

SEQ ID NO: 16680 - DNA, 21 bp, Homo sapiens
cattttattaygtaacaatct

SEQ ID NO: 16681 - DNA, 21 bp, Homo sapiens
tgctcaattcrttaaccatta

SEQ ID NO: 16682 - DNA, 21 bp, Homo sapiens
ctcaaatcttyggcaattccc

SEQ ID NO: 16683 - DNA, 21 bp, Homo sapiens
attttagaaayatgtgctagt

SEQ ID NO: 16684 - DNA, 21 bp, Homo sapiens
tgccttgcacrtggcactcag

SEQ ID NO: 16685 - DNA, 21 bp, Homo sapiens
ttttctggcakattatgccac

SEQ ID NO: 16686 - DNA, 21 bp, Homo sapiens
atatcaactartcttaaaata

SEQ ID NO: 16687 - DNA, 21 bp, Homo sapiens
ttgagatgggraagtcaaaac

SEQ ID NO: 16688 - DNA, 21 bp, Homo sapiens
gaaatttcagygaaaagtctc

SEQ ID NO: 16689 - DNA, 21 bp, Homo sapiens
agaagtgagcwggtctttcaa

SEQ ID NO: 16690 - DNA, 21 bp, Homo sapiens
taaagttattsatccaaattc

SEQ ID NO: 16691 - DNA, 21 bp, Homo sapiens
atagtcaattsgttgcaaaac

SEQ ID NO: 16692 - DNA, 21 bp, Homo sapiens
tttgatggttkaaaataggat

SEQ ID NO: 16693 - DNA, 21 bp, Homo sapiens
ctgtttcttgytcaaatttga

SEQ ID NO: 16694 - DNA, 21 bp, Homo sapiens
aaaattaccawtgggaaatct

SEQ ID NO: 16695 - DNA, 21 bp, Homo sapiens
cccattcattkttgcattcag

SEQ ID NO: 16696 - DNA, 21 bp, Homo sapiens
ctcattgccayctaagtcata

SEQ ID NO: 16697 - DNA, 21 bp, Homo sapiens
gcaggacataytgacatcata

SEQ ID NO: 16698 - DNA, 21 bp, Homo sapiens
gtttaagcatygccttttatg

SEQ ID NO: 16699 - DNA, 21 bp, Homo sapiens
agaggcccgtraagtggccag

SEQ ID NO: 16700 - DNA, 21 bp, Homo sapiens
ttgtgtagccygtgttaccta

SEQ ID NO: 16701 - DNA, 21 bp, Homo sapiens
ctgagtggcaytgaaagccag

SEQ ID NO: 16702 - DNA, 21 bp, Homo sapiens
tactatgacakgaacagaata

SEQ ID NO: 16703 - DNA, 21 bp, Homo sapiens
ggccacagtcrtcttttacct

SEQ ID NO: 16704 - DNA, 21 bp, Homo sapiens
attacacatayaaagttcttg

SEQ ID NO: 16705 - DNA, 21 bp, Homo sapiens
gtctacagctytaaggattca

SEQ ID NO: 16706 - DNA, 21 bp, Homo sapiens
aatttcattgrcaccagctac

SEQ ID NO: 16707 - DNA, 21 bp, Homo sapiens
aataggaattsatagcacagt

SEQ ID NO: 16708 - DNA, 21 bp, Homo sapiens
caaaacactckcagcaaccag

SEQ ID NO: 16709 - DNA, 21 bp, Homo sapiens
ccaatgccacwgaaatatttc

SEQ ID NO: 16710 - DNA, 21 bp, Homo sapiens
agatggccacrttagatggaa

SEQ ID NO: 16711 - DNA, 21 bp, Homo sapiens
tggccctgtcrgagaagaaag

SEQ ID NO: 16712 - DNA, 21 bp, Homo sapiens
taaaatagtaycctgctgact

SEQ ID NO: 16713 - DNA, 21 bp, Homo sapiens
aaaggtgcggyggtattgcta

SEQ ID NO: 16714 - DNA, 21 bp, Homo sapiens
tcttcacgtgktatctctttc

SEQ ID NO: 16715 - DNA, 21 bp, Homo sapiens
acctgaggctygcaaaggact

SEQ ID NO: 16716 - DNA, 21 bp, Homo sapiens
caaggtattcmcaatatctat

SEQ ID NO: 16717 - DNA, 21 bp, Homo sapiens
caggaagcctsagttttgctt

SEQ ID NO: 16718 - DNA, 21 bp, Homo sapiens
ggctgacatcrtaggtatagc

SEQ ID NO: 16719 - DNA, 21 bp, Homo sapiens
gccaggtgatytgtatgcact

SEQ ID NO: 16720 - DNA, 21 bp, Homo sapiens
ctcattttatrgacaagataa

SEQ ID NO: 16721 - DNA, 21 bp, Homo sapiens
tcttcccactmcgcgtcccct

SEQ ID NO: 16722 - DNA, 21 bp, Homo sapiens
gctggtttagstttaaaagga

SEQ ID NO: 16723 - DNA, 21 bp, Homo sapiens
caatcttgggmaggttaatag

SEQ ID NO: 16724 - DNA, 21 bp, Homo sapiens
gtcggctctgytgggcacgtg

SEQ ID NO: 16725 - DNA, 21 bp, Homo sapiens
gcttattatcyttggtcatga

SEQ ID NO: 16726 - DNA, 21 bp, Homo sapiens
actcagtagamtttttgtttt

SEQ ID NO: 16727 - DNA, 21 bp, Homo sapiens
ttcaatgtggrccataattct

SEQ ID NO: 16728 - DNA, 21 bp, Homo sapiens
acacattcttrtttattgcca

SEQ ID NO: 16729 - DNA, 21 bp, Homo sapiens
catgttgccarttattttcct

SEQ ID NO: 16730 - DNA, 21 bp, Homo sapiens
ctcatcaccgycttcctcttt

SEQ ID NO: 16731 - DNA, 21 bp, Homo sapiens
atatgctgatrttcgtgatgg

SEQ ID NO: 16732 - DNA, 21 bp, Homo sapiens
ctgcaccactrtggctcgaga

SEQ ID NO: 16733 - DNA, 21 bp, Homo sapiens
ccaccaatgcyttccgcctcc

SEQ ID NO: 16734 - DNA, 21 bp, Homo sapiens
ccttgggtacsacgtcctaca

SEQ ID NO: 16735 - DNA, 21 bp, Homo sapiens
tgtcaataatraagcagccct

SEQ ID NO: 16736 - DNA, 21 bp, Homo sapiens
cggaatgcagyggccccatca

SEQ ID NO: 16737 - DNA, 21 bp, Homo sapiens
gggaaactgargtccgaaaag

SEQ ID NO: 16738 - DNA, 21 bp, Homo sapiens
agcccttggaygctctcttaa

SEQ ID NO: 16739 - DNA, 21 bp, Homo sapiens
atcgggaagcygggcctaagt

SEQ ID NO: 16740 - DNA, 21 bp, Homo sapiens
acagattggtrtgcagacagc

SEQ ID NO: 16741 - DNA, 21 bp, Homo sapiens
gacaatgacaraggtaaaatc

SEQ ID NO: 16742 - DNA, 21 bp, Homo sapiens
cttttctgctrgcctgcaagt

SEQ ID NO: 16743 - DNA, 21 bp, Homo sapiens
tggggaggacytgtagaaatg

SEQ ID NO: 16744 - DNA, 21 bp, Homo sapiens
gacctgcagamagagagacgc

SEQ ID NO: 16745 - DNA, 21 bp, Homo sapiens
ggggatgatcrcttgcaggga

SEQ ID NO: 16746 - DNA, 21 bp, Homo sapiens
agacagtctcygccttttctc

SEQ ID NO: 16747 - DNA, 21 bp, Homo sapiens
ggggtcctccrcttggatgcc

SEQ ID NO: 16748 - DNA, 21 bp, Homo sapiens
tataccagcargggcctagca

SEQ ID NO: 16749 - DNA, 21 bp, Homo sapiens
ttagattcccrtgagtctctg

SEQ ID NO: 16750 - DNA, 21 bp, Homo sapiens
tatagaccagytgaggaggcg

SEQ ID NO: 16751 - DNA, 21 bp, Homo sapiens
aaattacaggyctgcttattt

SEQ ID NO: 16752 - DNA, 21 bp, Homo sapiens
tcatataattracatatcaat

SEQ ID NO: 16753 - DNA, 21 bp, Homo sapiens
tcaacatagamaatcctgtga

SEQ ID NO: 16754 - DNA, 21 bp, Homo sapiens
gagaatagccrtaaccagaat

SEQ ID NO: 16755 - DNA, 21 bp, Homo sapiens
atatatatatwtatttaggat

SEQ ID NO: 16756 - DNA, 21 bp, Homo sapiens
ggagggaatargcactactcc

SEQ ID NO: 16757 - DNA, 21 bp, Homo sapiens
aaaaaaaaaamacacacttca

SEQ ID NO: 16758 - DNA, 21 bp, Homo sapiens
acaaggaggcrtgggttcctc

SEQ ID NO: 16759 - DNA, 21 bp, Homo sapiens
tggcaggcaarctcagcgaca

SEQ ID NO: 16760 - DNA, 21 bp, Homo sapiens
ccagagagagycccccaaact

SEQ ID NO: 16761 - DNA, 21 bp, Homo sapiens
gtacaggaagkttcttagtga

SEQ ID NO: 16762 - DNA, 21 bp, Homo sapiens
gtgaagggtcrggaagagtca

SEQ ID NO: 16763 - DNA, 21 bp, Homo sapiens
ataggcaaacragtgatgaag

SEQ ID NO: 16764 - DNA, 21 bp, Homo sapiens
tcctcaactgsttttaggaat

SEQ ID NO: 16765 - DNA, 21 bp, Homo sapiens
ttttccttgaratcccttctg

SEQ ID NO: 16766 - DNA, 21 bp, Homo sapiens
ttttcctgtcrgaagttttca

SEQ ID NO: 16767 - DNA, 21 bp, Homo sapiens
cctttaccccractgcagatg

SEQ ID NO: 16768 - DNA, 21 bp, Homo sapiens
tatctctgcaytcaactccaa

SEQ ID NO: 16769 - DNA, 21 bp, Homo sapiens
tacgcttctgsttaaagatta

SEQ ID NO: 16770 - DNA, 21 bp, Homo sapiens
gcaaatttacygtactttgta

SEQ ID NO: 16771 - DNA, 21 bp, Homo sapiens
atattaaaaaytgtctatctc

SEQ ID NO: 16772 - DNA, 21 bp, Homo sapiens
acttgaaaggytgaattggtg

SEQ ID NO: 16773 - DNA, 21 bp, Homo sapiens
gataataaaaytgtgatataa

SEQ ID NO: 16774 - DNA, 21 bp, Homo sapiens
ttaacaatccyattaatgtgt

SEQ ID NO: 16775 - DNA, 21 bp, Homo sapiens
ggagaatgggygatactgaag

SEQ ID NO: 16776 - DNA, 21 bp, Homo sapiens
ccttttccctytcacctatcc

SEQ ID NO: 16777 - DNA, 21 bp, Homo sapiens
ttaatttatcraatacacatt

SEQ ID NO: 16778 - DNA, 21 bp, Homo sapiens
aaaacacaaayggctttcaat

SEQ ID NO: 16779 - DNA, 21 bp, Homo sapiens
ggaattgctaytggatagaaa

SEQ ID NO: 16780 - DNA, 21 bp, Homo sapiens
aacaagaacgygtgcataaat

SEQ ID NO: 16781 - DNA, 21 bp, Homo sapiens
atctttaacaycaacacctgg

SEQ ID NO: 16782 - DNA, 21 bp, Homo sapiens
atttttgcaaygcaaatacgc

SEQ ID NO: 16783 - DNA, 21 bp, Homo sapiens
tatgaatctgsaatgaaaatg

SEQ ID NO: 16784 - DNA, 21 bp, Homo sapiens
cattatttgtmaattacagta

SEQ ID NO: 16785 - DNA, 21 bp, Homo sapiens
acctgctaagrctgataagaa

SEQ ID NO: 16786 - DNA, 21 bp, Homo sapiens
tttagattgawtccaccatgg

SEQ ID NO: 16787 - DNA, 21 bp, Homo sapiens
atcccaaccamgttgttacac

SEQ ID NO: 16788 - DNA, 21 bp, Homo sapiens
gaacaaagtasaatagagatc

SEQ ID NO: 16789 - DNA, 21 bp, Homo sapiens
gaagcttagtrtaagaattac

SEQ ID NO: 16790 - DNA, 21 bp, Homo sapiens
aaccctggccratagaggaac

SEQ ID NO: 16791 - DNA, 21 bp, Homo sapiens
tagcgactgtyggcattcatg

SEQ ID NO: 16792 - DNA, 21 bp, Homo sapiens
aactaacacayccctagaata

SEQ ID NO: 16793 - DNA, 21 bp, Homo sapiens
tcaccaccctsgtcagggttt

SEQ ID NO: 16794 - DNA, 21 bp, Homo sapiens
ttacatcagargaccagggct

SEQ ID NO: 16795 - DNA, 21 bp, Homo sapiens
atacatcattscactctctcc

SEQ ID NO: 16796 - DNA, 21 bp, Homo sapiens
atcaggtaacraattcacctt

SEQ ID NO: 16797 - DNA, 21 bp, Homo sapiens
gctccacgagkattgctcatt

SEQ ID NO: 16798 - DNA, 21 bp, Homo sapiens
tctcgtacttygtgtctgagg

SEQ ID NO: 16799 - DNA, 21 bp, Homo sapiens
aaaaaaagtcrtaactgctgg

SEQ ID NO: 16800 - DNA, 21 bp, Homo sapiens
ttcttaatgtrtcttttatgt

SEQ ID NO: 16801 - DNA, 21 bp, Homo sapiens
gtgtttcttcrtgcatgcccc

SEQ ID NO: 16802 - DNA, 21 bp, Homo sapiens
tattcttgggrtgacagtgaa

SEQ ID NO: 16803 - DNA, 21 bp, Homo sapiens
ctgaacatccrtcaccagctc

SEQ ID NO: 16804 - DNA, 21 bp, Homo sapiens
atctttggagkctgaatttat

SEQ ID NO: 16805 - DNA, 21 bp, Homo sapiens
caaactcaccrggtagtacca

SEQ ID NO: 16806 - DNA, 21 bp, Homo sapiens
cctttcttcakatcatgtaag

SEQ ID NO: 16807 - DNA, 21 bp, Homo sapiens
tggacaatccrtgttggagct

SEQ ID NO: 16808 - DNA, 21 bp, Homo sapiens
ggtgtctgttytagggccagg

SEQ ID NO: 16809 - DNA, 21 bp, Homo sapiens
atgtccagggmaaggaacact

SEQ ID NO: 16810 - DNA, 21 bp, Homo sapiens
taaaaatgaasaattgagaca

SEQ ID NO: 16811 - DNA, 21 bp, Homo sapiens
aaagccattgmcgattggttc

SEQ ID NO: 16812 - DNA, 21 bp, Homo sapiens
agagctcctamcccagaggct

SEQ ID NO: 16813 - DNA, 21 bp, Homo sapiens
aattgcaatgytagtcccagt

SEQ ID NO: 16814 - DNA, 21 bp, Homo sapiens
ctctcgcttgytgagataggt

SEQ ID NO: 16815 - DNA, 21 bp, Homo sapiens
cactaagggarctcactcaaa

SEQ ID NO: 16816 - DNA, 21 bp, Homo sapiens
tctgtgaatcycagattaaga

SEQ ID NO: 16817 - DNA, 21 bp, Homo sapiens
ttaaccttcartatcaattgc

SEQ ID NO: 16818 - DNA, 21 bp, Homo sapiens
cttgggggctkaacaagtgtt

SEQ ID NO: 16819 - DNA, 21 bp, Homo sapiens
ggtagcatctrtgtttagaaa

SEQ ID NO: 16820 - DNA, 21 bp, Homo sapiens
tgtggggctawgtgccaggca

SEQ ID NO: 16821 - DNA, 21 bp, Homo sapiens
gtagcctaaayattcttcagc

SEQ ID NO: 16822 - DNA, 21 bp, Homo sapiens
tctccatctcrcagttggctt

SEQ ID NO: 16823 - DNA, 21 bp, Homo sapiens
tataaattttycccaagtctt

SEQ ID NO: 16824 - DNA, 21 bp, Homo sapiens
tcatgagtgarcaaatcagaa

SEQ ID NO: 16825 - DNA, 21 bp, Homo sapiens
aaagataattyagacaaattt

SEQ ID NO: 16826 - DNA, 21 bp, Homo sapiens
gattggcatgytcatttgtca

SEQ ID NO: 16827 - DNA, 21 bp, Homo sapiens
tgtcacattcwgtaaaatttg

SEQ ID NO: 16828 - DNA, 21 bp, Homo sapiens
tggaaatgttmtcaaattatc

SEQ ID NO: 16829 - DNA, 21 bp, Homo sapiens
cttcgaaactstctacttggc

SEQ ID NO: 16830 - DNA, 21 bp, Homo sapiens
aagcaactcaytgtgtttgga

SEQ ID NO: 16831 - DNA, 21 bp, Homo sapiens
ggcttcctaaytcatggacaa

SEQ ID NO: 16832 - DNA, 21 bp, Homo sapiens
accactgttayattgtatacc

SEQ ID NO: 16833 - DNA, 21 bp, Homo sapiens
atattcaaaayaatgttaaac

SEQ ID NO: 16834 - DNA, 21 bp, Homo sapiens
gtatagagatkttaaccactt

SEQ ID NO: 16835 - DNA, 21 bp, Homo sapiens
gtagtctccaycctggtatgc

SEQ ID NO: 16836 - DNA, 21 bp, Homo sapiens
agcagagtacrtatgcttaga

SEQ ID NO: 16837 - DNA, 21 bp, Homo sapiens
gctagttctcrgactttatag

SEQ ID NO: 16838 - DNA, 21 bp, Homo sapiens
ccactcaagtrtcttacttct

SEQ ID NO: 16839 - DNA, 21 bp, Homo sapiens
atgcttcccakaataaagttt

SEQ ID NO: 16840 - DNA, 21 bp, Homo sapiens
agtccatcagkaaacatggtt

SEQ ID NO: 16841 - DNA, 21 bp, Homo sapiens
ttttaggatcrgttgtccttg

SEQ ID NO: 16842 - DNA, 21 bp, Homo sapiens
ctctcagttcytaaggaaacc

SEQ ID NO: 16843 - DNA, 21 bp, Homo sapiens
gttattcactrttagctacta

SEQ ID NO: 16844 - DNA, 21 bp, Homo sapiens
agagtgtgctrtcggaaatct

SEQ ID NO: 16845 - DNA, 21 bp, Homo sapiens
agttctccacrcatgaaagca

SEQ ID NO: 16846 - DNA, 21 bp, Homo sapiens
aaaatgtaacrtgcaaaattt

SEQ ID NO: 16847 - DNA, 21 bp, Homo sapiens
gatgtcactasaaaacaagag

SEQ ID NO: 16848 - DNA, 21 bp, Homo sapiens
cagatttaatrtggttcttct

SEQ ID NO: 16849 - DNA, 21 bp, Homo sapiens
tgtatatagtyatttcctctg

SEQ ID NO: 16850 - DNA, 21 bp, Homo sapiens
ggttaataatmtttttttctt

SEQ ID NO: 16851 - DNA, 21 bp, Homo sapiens
aagattattamatgaatttgc

SEQ ID NO: 16852 - DNA, 21 bp, Homo sapiens
ccatacatttmaaattggaat

SEQ ID NO: 16853 - DNA, 21 bp, Homo sapiens
ggaaaataaaytcctcaggtc

SEQ ID NO: 16854 - DNA, 21 bp, Homo sapiens
tgaaagatagytccagtaatt

SEQ ID NO: 16855 - DNA, 21 bp, Homo sapiens
attttgcaaayctttgcagta

SEQ ID NO: 16856 - DNA, 21 bp, Homo sapiens
ccattgtgtgmcgaagtttat

SEQ ID NO: 16857 - DNA, 21 bp, Homo sapiens
tctatgacatstgtgtttatc

SEQ ID NO: 16858 - DNA, 21 bp, Homo sapiens
agtgattattmtttactttgc

SEQ ID NO: 16859 - DNA, 21 bp, Homo sapiens
gtatacgaagraagttccaac

SEQ ID NO: 16860 - DNA, 21 bp, Homo sapiens
catggtctggwacacgggcac

SEQ ID NO: 16861 - DNA, 21 bp, Homo sapiens
tcatattagaratagaagcag

SEQ ID NO: 16862 - DNA, 21 bp, Homo sapiens
gtgcgtccatrgctgaggcct

SEQ ID NO: 16863 - DNA, 21 bp, Homo sapiens
aaattgagatktcagaataaa

SEQ ID NO: 16864 - DNA, 21 bp, Homo sapiens
taaatttatgycaccctcatt

SEQ ID NO: 16865 - DNA, 21 bp, Homo sapiens
cagtgtgtctrgaagtgtcta

SEQ ID NO: 16866 - DNA, 21 bp, Homo sapiens
tcactagaagkccagcagttt

SEQ ID NO: 16867 - DNA, 21 bp, Homo sapiens
aaatccatcaytatcttagca

SEQ ID NO: 16868 - DNA, 21 bp, Homo sapiens
taaagacgaaragcctcacct

SEQ ID NO: 16869 - DNA, 21 bp, Homo sapiens
attttcttccstatcggtcct

SEQ ID NO: 16870 - DNA, 21 bp, Homo sapiens
ggaaacctaarcagaggcaaa

SEQ ID NO: 16871 - DNA, 21 bp, Homo sapiens
atgtgagcatwctttattttt

SEQ ID NO: 16872 - DNA, 21 bp, Homo sapiens
gatactaaggycctcctgctg

SEQ ID NO: 16873 - DNA, 21 bp, Homo sapiens
tgcctcagagwacggattttg

SEQ ID NO: 16874 - DNA, 21 bp, Homo sapiens
aacttgctatytatatgaaaa

SEQ ID NO: 16875 - DNA, 21 bp, Homo sapiens
taacttaatcrtcaacattta

SEQ ID NO: 16876 - DNA, 21 bp, Homo sapiens
agaacagcctkcatgaacagc

SEQ ID NO: 16877 - DNA, 21 bp, Homo sapiens
aacttaatgcyttacatagtc

SEQ ID NO: 16878 - DNA, 21 bp, Homo sapiens
cctttctgctwtctgttggta

SEQ ID NO: 16879 - DNA, 21 bp, Homo sapiens
atgattaacayagaaacatgc

SEQ ID NO: 16880 - DNA, 21 bp, Homo sapiens
ttatgtacagkttttttcata

SEQ ID NO: 16881 - DNA, 21 bp, Homo sapiens
ttctataaatrtcacttctct

SEQ ID NO: 16882 - DNA, 21 bp, Homo sapiens
tgttggaaaamgagcaagact

SEQ ID NO: 16883 - DNA, 21 bp, Homo sapiens
tttgctggctrtttgaaaagt

SEQ ID NO: 16884 - DNA, 21 bp, Homo sapiens
ggtattaaaartaagcttgac

SEQ ID NO: 16885 - DNA, 21 bp, Homo sapiens
ggaagaaagascataacagtt

SEQ ID NO: 16886 - DNA, 21 bp, Homo sapiens
ggaaacacccrtttagaaccc

SEQ ID NO: 16887 - DNA, 21 bp, Homo sapiens
aaggatttgarccagattgtg

SEQ ID NO: 16888 - DNA, 21 bp, Homo sapiens
caaacctcaayaccacagagg

SEQ ID NO: 16889 - DNA, 21 bp, Homo sapiens
ttgaattgttycctaatcctt

SEQ ID NO: 16890 - DNA, 21 bp, Homo sapiens
taccttgaaaygcaccactta

SEQ ID NO: 16891 - DNA, 21 bp, Homo sapiens
tagccctgatsccagtgattg

SEQ ID NO: 16892 - DNA, 21 bp, Homo sapiens
actacttactrtttggctctt

SEQ ID NO: 16893 - DNA, 21 bp, Homo sapiens
gacatgtctgrtatagtatgg

SEQ ID NO: 16894 - DNA, 21 bp, Homo sapiens
aagtgatggaraatagacaga

SEQ ID NO: 16895 - DNA, 21 bp, Homo sapiens
tgggtttgtcmtcctctgtcc

SEQ ID NO: 16896 - DNA, 21 bp, Homo sapiens
ccttggagacsagtgacattg

SEQ ID NO: 16897 - DNA, 21 bp, Homo sapiens
tgtttcctaartatgggaggg

SEQ ID NO: 16898 - DNA, 21 bp, Homo sapiens
gaccatgagarctgctaagaa

SEQ ID NO: 16899 - DNA, 21 bp, Homo sapiens
catgtcatacygctcagaaaa

SEQ ID NO: 16900 - DNA, 21 bp, Homo sapiens
ggtctctaccrtcttcaccat

SEQ ID NO: 16901 - DNA, 21 bp, Homo sapiens
ttcttcatcamcccctcatgt

SEQ ID NO: 16902 - DNA, 21 bp, Homo sapiens
agcaaatgttktagggtcagt

SEQ ID NO: 16903 - DNA, 21 bp, Homo sapiens
taatcttaccrtatgaaaatg

SEQ ID NO: 16904 - DNA, 21 bp, Homo sapiens
ttaatgacgcygcagctgccc

SEQ ID NO: 16905 - DNA, 21 bp, Homo sapiens
tcaaccactcyttgtctgaac

SEQ ID NO: 16906 - DNA, 21 bp, Homo sapiens
gagattaggcygggctaaacc

SEQ ID NO: 16907 - DNA, 21 bp, Homo sapiens
tttctaacagyccttcccaac

SEQ ID NO: 16908 - DNA, 21 bp, Homo sapiens
gacatgatccrcgtgcagaaa

SEQ ID NO: 16909 - DNA, 21 bp, Homo sapiens
tttcaacgagsaaaacagtga

SEQ ID NO: 16910 - DNA, 21 bp, Homo sapiens
tgagcaatcaratcatattca

SEQ ID NO: 16911 - DNA, 21 bp, Homo sapiens
cagatgaatasactgaatctc

SEQ ID NO: 16912 - DNA, 21 bp, Homo sapiens
ccacttatcaygaaaaggcaa

SEQ ID NO: 16913 - DNA, 21 bp, Homo sapiens
gagaaatatarttgagaaata

SEQ ID NO: 16914 - DNA, 21 bp, Homo sapiens
gtgctgccttmcatttattcc

SEQ ID NO: 16915 - DNA, 21 bp, Homo sapiens
tggatgatcargcagaaggaa

SEQ ID NO: 16916 - DNA, 21 bp, Homo sapiens
tgggatatacrgtctgtccaa

SEQ ID NO: 16917 - DNA, 21 bp, Homo sapiens
gggatatttgrcatgaagatt

SEQ ID NO: 16918 - DNA, 21 bp, Homo sapiens
catgggcatgkgcctatctca

SEQ ID NO: 16919 - DNA, 21 bp, Homo sapiens
gtgcacttgcrtgggtatggc

SEQ ID NO: 16920 - DNA, 21 bp, Homo sapiens
ggttgaagaaycatccccctt

SEQ ID NO: 16921 - DNA, 21 bp, Homo sapiens
taaatttaccrtattttcaac

SEQ ID NO: 16922 - DNA, 21 bp, Homo sapiens
atttcatttgrtaagatttga

SEQ ID NO: 16923 - DNA, 21 bp, Homo sapiens
ttgattaaaayatgtcatcct

SEQ ID NO: 16924 - DNA, 21 bp, Homo sapiens
attgatggtaktctgcatgtt

SEQ ID NO: 16925 - DNA, 21 bp, Homo sapiens
tccctacatcraaaccagcac

SEQ ID NO: 16926 - DNA, 21 bp, Homo sapiens
taactgaacawgtgatatgct

SEQ ID NO: 16927 - DNA, 21 bp, Homo sapiens
tttctgactcyctcaatgaag

SEQ ID NO: 16928 - DNA, 21 bp, Homo sapiens
ctttctttacyatctctcaca

SEQ ID NO: 16929 - DNA, 21 bp, Homo sapiens
ggcgagagaaracaagccaaa

SEQ ID NO: 16930 - DNA, 21 bp, Homo sapiens
gcttgactgartacatggata

SEQ ID NO: 16931 - DNA, 21 bp, Homo sapiens
aactttacctktgggaaaatt

SEQ ID NO: 16932 - DNA, 21 bp, Homo sapiens
gggcttgaggrctgtagtttc

SEQ ID NO: 16933 - DNA, 21 bp, Homo sapiens
ctaatacactmattgacagat

SEQ ID NO: 16934 - DNA, 21 bp, Homo sapiens
ggaactttcartgtgacacta

SEQ ID NO: 16935 - DNA, 21 bp, Homo sapiens
ttttctccctycgactgccac

SEQ ID NO: 16936 - DNA, 21 bp, Homo sapiens
gaaagtatgtrgatatggtaa

SEQ ID NO: 16937 - DNA, 21 bp, Homo sapiens
taaaaaaaggyaatttgtggt

SEQ ID NO: 16938 - DNA, 21 bp, Homo sapiens
ttagaaccttrctacagaaca

SEQ ID NO: 16939 - DNA, 21 bp, Homo sapiens
cccctgtctgsactctaatca

SEQ ID NO: 16940 - DNA, 21 bp, Homo sapiens
aagaatgaatsaatgcatata

SEQ ID NO: 16941 - DNA, 21 bp, Homo sapiens
taaaaagcctktattcacata

SEQ ID NO: 16942 - DNA, 21 bp, Homo sapiens
attttaaattrtttaaaccat

SEQ ID NO: 16943 - DNA, 21 bp, Homo sapiens
agggctatgtrtacaaattaa

SEQ ID NO: 16944 - DNA, 21 bp, Homo sapiens
aggttctgttmttgtaagatt

SEQ ID NO: 16945 - DNA, 21 bp, Homo sapiens
catttcccatrttttccaaat

SEQ ID NO: 16946 - DNA, 21 bp, Homo sapiens
gccagctgccygaatgatgtg

SEQ ID NO: 16947 - DNA, 21 bp, Homo sapiens
agaggaagaamctgatctatt

SEQ ID NO: 16948 - DNA, 21 bp, Homo sapiens
tatttaagagrtcgttcttcc

SEQ ID NO: 16949 - DNA, 21 bp, Homo sapiens
tcaaaacaatrgatgattgga

SEQ ID NO: 16950 - DNA, 21 bp, Homo sapiens
tgcccgctgcrctggttcaga

SEQ ID NO: 16951 - DNA, 21 bp, Homo sapiens
tatcctgagcyatctgtaact

SEQ ID NO: 16952 - DNA, 21 bp, Homo sapiens
gaccccaccgytttacagcct

SEQ ID NO: 16953 - DNA, 21 bp, Homo sapiens
cctgtaggtgmttatctcaaa

SEQ ID NO: 16954 - DNA, 21 bp, Homo sapiens
ttcttggacaygctcttttct

SEQ ID NO: 16955 - DNA, 21 bp, Homo sapiens
tcgatatgttmatagcacata

SEQ ID NO: 16956 - DNA, 21 bp, Homo sapiens
aaataacttaytcaacttcgt

SEQ ID NO: 16957 - DNA, 21 bp, Homo sapiens
ctagtgtatgyaaccatcagt

SEQ ID NO: 16958 - DNA, 21 bp, Homo sapiens
tttggtgtgargaggttcggc

SEQ ID NO: 16959 - DNA, 21 bp, Homo sapiens
attttaacaarccgtttgaaa

SEQ ID NO: 16960 - DNA, 21 bp, Homo sapiens
cagaagttcargggcctttgt

SEQ ID NO: 16961 - DNA, 21 bp, Homo sapiens
tacttaccctrtggagaaagg

SEQ ID NO: 16962 - DNA, 21 bp, Homo sapiens
ccactcctaarcgggtctcca

SEQ ID NO: 16963 - DNA, 21 bp, Homo sapiens
aaagaaagaartgaggctcaa

SEQ ID NO: 16964 - DNA, 21 bp, Homo sapiens
tctgcttctcktcaggttttc

SEQ ID NO: 16965 - DNA, 21 bp, Homo sapiens
acgggaatccrgacagtgtat

SEQ ID NO: 16966 - DNA, 21 bp, Homo sapiens
gtggataactktttttcttgc

SEQ ID NO: 16967 - DNA, 21 bp, Homo sapiens
taaacctactyagaaattatt

SEQ ID NO: 16968 - DNA, 21 bp, Homo sapiens
tcatacacacrcgtacttctc

SEQ ID NO: 16969 - DNA, 21 bp, Homo sapiens
tccagccgctraaggtcggcc

SEQ ID NO: 16970 - DNA, 21 bp, Homo sapiens
ccatgtactaycctagttcca

SEQ ID NO: 16971 - DNA, 21 bp, Homo sapiens
agggagaagayagcactggga

SEQ ID NO: 16972 - DNA, 21 bp, Homo sapiens
ggtcattttaytggctagaaa

SEQ ID NO: 16973 - DNA, 21 bp, Homo sapiens
caggtatgatragtggcatgg

SEQ ID NO: 16974 - DNA, 21 bp, Homo sapiens
ctttctcctartcctctattc

SEQ ID NO: 16975 - DNA, 21 bp, Homo sapiens
ggcatatttcrggaaaagcag

SEQ ID NO: 16976 - DNA, 21 bp, Homo sapiens
gagagttgctyaggctgaaaa

SEQ ID NO: 16977 - DNA, 21 bp, Homo sapiens
accgagaaaasaaaatcaatt

SEQ ID NO: 16978 - DNA, 21 bp, Homo sapiens
ctttcttcatmtggagttcaa

SEQ ID NO: 16979 - DNA, 21 bp, Homo sapiens
atttaaagacraactgatact

SEQ ID NO: 16980 - DNA, 21 bp, Homo sapiens
taaccaatggycccggatttc

SEQ ID NO: 16981 - DNA, 21 bp, Homo sapiens
tgttctccacwaaagcaaaca

SEQ ID NO: 16982 - DNA, 21 bp, Homo sapiens
tgcggcctctrgtttgatcag

SEQ ID NO: 16983 - DNA, 21 bp, Homo sapiens
tgattcctgakggtcactggt

SEQ ID NO: 16984 - DNA, 21 bp, Homo sapiens
ttaaaaaatgkcccagtcagt

SEQ ID NO: 16985 - DNA, 21 bp, Homo sapiens
gatgtcccacwattcttagag

SEQ ID NO: 16986 - DNA, 21 bp, Homo sapiens
gtattgtaaasattcaccctg

SEQ ID NO: 16987 - DNA, 21 bp, Homo sapiens
cctgcatgackggtgacctct

SEQ ID NO: 16988 - DNA, 21 bp, Homo sapiens
cagactgcagstactttggct

SEQ ID NO: 16989 - DNA, 21 bp, Homo sapiens
cattgtgttgyaagagtttca

SEQ ID NO: 16990 - DNA, 21 bp, Homo sapiens
aagttggtctygggaggagtt

SEQ ID NO: 16991 - DNA, 21 bp, Homo sapiens
ggctgattagyggagacggtc

SEQ ID NO: 16992 - DNA, 21 bp, Homo sapiens
ccacttaacaytggaggattg

SEQ ID NO: 16993 - DNA, 21 bp, Homo sapiens
gaaaattatasccaacaatat

SEQ ID NO: 16994 - DNA, 21 bp, Homo sapiens
agcctggctargcagaatcct

SEQ ID NO: 16995 - DNA, 21 bp, Homo sapiens
ataaaaattasatcaatttcc

SEQ ID NO: 16996 - DNA, 21 bp, Homo sapiens
aaaaattcttygagctaaaaa

SEQ ID NO: 16997 - DNA, 21 bp, Homo sapiens
gattttcatgkcagtgttgga

SEQ ID NO: 16998 - DNA, 21 bp, Homo sapiens
acagaaactgwttcaaacttc

SEQ ID NO: 16999 - DNA, 21 bp, Homo sapiens
agacaattttraaggaaagag

SEQ ID NO: 17000 - DNA, 21 bp, Homo sapiens
aatctaggccktcatgggaat

SEQ ID NO: 17001 - DNA, 21 bp, Homo sapiens
ttgtgcttaawaggaatgtga

SEQ ID NO: 17002 - DNA, 21 bp, Homo sapiens
attataccctygggctttcta

SEQ ID NO: 17003 - DNA, 21 bp, Homo sapiens
tttttctgggratttactaca

SEQ ID NO: 17004 - DNA, 21 bp, Homo sapiens
tattttacttmtttacagaat

SEQ ID NO: 17005 - DNA, 21 bp, Homo sapiens
tgtcaccacgwttgtttaccg

SEQ ID NO: 17006 - DNA, 21 bp, Homo sapiens
gtgatggcacrgtttggtgtc

SEQ ID NO: 17007 - DNA, 21 bp, Homo sapiens
tcatcataggrctttaaagtt

SEQ ID NO: 17008 - DNA, 21 bp, Homo sapiens
ctcctcagccytgcagctaat

SEQ ID NO: 17009 - DNA, 21 bp, Homo sapiens
aaattatcagmgggaatttag

SEQ ID NO: 17010 - DNA, 21 bp, Homo sapiens
ggatggaaagrgaaactagaa

SEQ ID NO: 17011 - DNA, 21 bp, Homo sapiens
caccctcaaaycacagcctct

SEQ ID NO: 17012 - DNA, 21 bp, Homo sapiens
ggggagtactwcctcatctgt

SEQ ID NO: 17013 - DNA, 21 bp, Homo sapiens
aatatttccayaaaagaagga

SEQ ID NO: 17014 - DNA, 21 bp, Homo sapiens
atgctgacctyaccacctcca

SEQ ID NO: 17015 - DNA, 21 bp, Homo sapiens
aacccatgackcttggacaca

SEQ ID NO: 17016 - DNA, 21 bp, Homo sapiens
ctgaatgcggrtggtttagaa

SEQ ID NO: 17017 - DNA, 21 bp, Homo sapiens
atggtgctcarcatggcccca

SEQ ID NO: 17018 - DNA, 21 bp, Homo sapiens
aaattaaacgycaacagtgaa

SEQ ID NO: 17019 - DNA, 21 bp, Homo sapiens
aaagtgcgagktcccctcagc

SEQ ID NO: 17020 - DNA, 21 bp, Homo sapiens
gtaataaaatkatattcctac

SEQ ID NO: 17021 - DNA, 21 bp, Homo sapiens
aaccaatagcytaagtgaaga

SEQ ID NO: 17022 - DNA, 21 bp, Homo sapiens
gcctatgcgarccccaggcct

SEQ ID NO: 17023 - DNA, 21 bp, Homo sapiens
agaagtctccrcagtgcactg

SEQ ID NO: 17024 - DNA, 21 bp, Homo sapiens
gagtggtgaakgaggggcagc

SEQ ID NO: 17025 - DNA, 21 bp, Homo sapiens
tgattgcctcrgagagacagc

SEQ ID NO: 17026 - DNA, 21 bp, Homo sapiens
ctgtccaaggytattatggga

SEQ ID NO: 17027 - DNA, 21 bp, Homo sapiens
ttcgaaagacrtgttctacat

SEQ ID NO: 17028 - DNA, 21 bp, Homo sapiens
aaaacctgacrtcaaacaggg

SEQ ID NO: 17029 - DNA, 21 bp, Homo sapiens
gactcccaagsccagcccacg

SEQ ID NO: 17030 - DNA, 21 bp, Homo sapiens
cctgaaacctstgataggatg

SEQ ID NO: 17031 - DNA, 21 bp, Homo sapiens
accatcacagygcacatggaa

SEQ ID NO: 17032 - DNA, 21 bp, Homo sapiens
ccaggagtcarcagccagtca

SEQ ID NO: 17033 - DNA, 21 bp, Homo sapiens
ccaaccagccstcccagcagg

SEQ ID NO: 17034 - DNA, 21 bp, Homo sapiens
cttgaacaatracagtgttga

SEQ ID NO: 17035 - DNA, 21 bp, Homo sapiens
tgtttcagagrcccatgtctt

SEQ ID NO: 17036 - DNA, 21 bp, Homo sapiens
tagaaagagargtttctttct

SEQ ID NO: 17037 - DNA, 21 bp, Homo sapiens
gcatttgaacsatacttagga

SEQ ID NO: 17038 - DNA, 21 bp, Homo sapiens
tgcttactttstgccagacac

SEQ ID NO: 17039 - DNA, 21 bp, Homo sapiens
ttcttaggaartagtacctct

SEQ ID NO: 17040 - DNA, 21 bp, Homo sapiens
acttttgcacwgttaatctgc

SEQ ID NO: 17041 - DNA, 21 bp, Homo sapiens
tagaaacactkgccatgtttt

SEQ ID NO: 17042 - DNA, 21 bp, Homo sapiens
ttaagagaacrttttgtttgc

SEQ ID NO: 17043 - DNA, 21 bp, Homo sapiens
ttttcacaggkacataggatg

SEQ ID NO: 17044 - DNA, 21 bp, Homo sapiens
agtgcctgatyctaagatatg

SEQ ID NO: 17045 - DNA, 21 bp, Homo sapiens
ttttaattacrgtagatttat

SEQ ID NO: 17046 - DNA, 21 bp, Homo sapiens
cataaaaagargaaaacagca

SEQ ID NO: 17047 - DNA, 21 bp, Homo sapiens
gtgggctggtkgagcgagtca

SEQ ID NO: 17048 - DNA, 21 bp, Homo sapiens
ttagctcactrcttggaagct

SEQ ID NO: 17049 - DNA, 21 bp, Homo sapiens
atgaaaaaaawttaaaatcaa

SEQ ID NO: 17050 - DNA, 21 bp, Homo sapiens
ctgtcataacwtcccttattt

SEQ ID NO: 17051 - DNA, 21 bp, Homo sapiens
gagatgagttrattttaagct

SEQ ID NO: 17052 - DNA, 21 bp, Homo sapiens
cctttctgtgrctgataaatt

SEQ ID NO: 17053 - DNA, 21 bp, Homo sapiens
gaaaattagayggtctgtgaa

SEQ ID NO: 17054 - DNA, 21 bp, Homo sapiens
tgactacaaartgcaacctgt

SEQ ID NO: 17055 - DNA, 21 bp, Homo sapiens
aagctaaaacrtgtgccctgg

SEQ ID NO: 17056 - DNA, 21 bp, Homo sapiens
aaatcattcawcatttaatat

SEQ ID NO: 17057 - DNA, 21 bp, Homo sapiens
ctatcagtcayagtcctatga

SEQ ID NO: 17058 - DNA, 21 bp, Homo sapiens
ttataagtcaytgtgaatttc

SEQ ID NO: 17059 - DNA, 21 bp, Homo sapiens
ggtgaacactrtctttcttgg

SEQ ID NO: 17060 - DNA, 21 bp, Homo sapiens
ttctgtacatscatgaggaaa

SEQ ID NO: 17061 - DNA, 21 bp, Homo sapiens
taatgtggtamcttatactag

SEQ ID NO: 17062 - DNA, 21 bp, Homo sapiens
tctctggtcastaccatttaa

SEQ ID NO: 17063 - DNA, 21 bp, Homo sapiens
gaaaattccaygatagataaa

SEQ ID NO: 17064 - DNA, 21 bp, Homo sapiens
tgccattggaragtataaaca

SEQ ID NO: 17065 - DNA, 21 bp, Homo sapiens
aggctgtaggmcccttgctgt

SEQ ID NO: 17066 - DNA, 21 bp, Homo sapiens
caaattttcaytaaaaacaaa

SEQ ID NO: 17067 - DNA, 21 bp, Homo sapiens
agtgtataatrtaaccctgct

SEQ ID NO: 17068 - DNA, 21 bp, Homo sapiens
gcagtcgccaratcatcaaaa

SEQ ID NO: 17069 - DNA, 21 bp, Homo sapiens
gagtaggtagraaaaaaattg

SEQ ID NO: 17070 - DNA, 21 bp, Homo sapiens
ggtaaaaatayatgagagact

SEQ ID NO: 17071 - DNA, 21 bp, Homo sapiens
tacccaggaaragctcagtta

SEQ ID NO: 17072 - DNA, 21 bp, Homo sapiens
aaatgtgaccrcctatcaaat

SEQ ID NO: 17073 - DNA, 21 bp, Homo sapiens
tgttggtctamgtgtctgtca

SEQ ID NO: 17074 - DNA, 21 bp, Homo sapiens
ccgaggcccartgttttctgg

SEQ ID NO: 17075 - DNA, 21 bp, Homo sapiens
gtctagctccytagatgtcaa

SEQ ID NO: 17076 - DNA, 21 bp, Homo sapiens
aaagtgggtcytggatcagat

SEQ ID NO: 17077 - DNA, 21 bp, Homo sapiens
gtggtcacctstaacagagcc

SEQ ID NO: 17078 - DNA, 21 bp, Homo sapiens
ttttaggctastttctctagt

SEQ ID NO: 17079 - DNA, 21 bp, Homo sapiens
ccttttgaaaytacatgactt

SEQ ID NO: 17080 - DNA, 21 bp, Homo sapiens
tcaattgcttsacagtagtcc

SEQ ID NO: 17081 - DNA, 21 bp, Homo sapiens
gacacaatagrtgataacagc

SEQ ID NO: 17082 - DNA, 21 bp, Homo sapiens
accccaaaaamtgtgtgtagt

SEQ ID NO: 17083 - DNA, 21 bp, Homo sapiens
gcattcttaarccttgactaa

SEQ ID NO: 17084 - DNA, 21 bp, Homo sapiens
agaaatgaaaytgtcatgagg

SEQ ID NO: 17085 - DNA, 21 bp, Homo sapiens
cattcatataycttcttttgg

SEQ ID NO: 17086 - DNA, 21 bp, Homo sapiens
ctatcctaggsagcactgtct

SEQ ID NO: 17087 - DNA, 21 bp, Homo sapiens
gaaacatatcrcttctcattc

SEQ ID NO: 17088 - DNA, 21 bp, Homo sapiens
acttatcaacwttaatactat

SEQ ID NO: 17089 - DNA, 21 bp, Homo sapiens
tttttaaatgstaaaattcac

SEQ ID NO: 17090 - DNA, 21 bp, Homo sapiens
acgtaaacagrtttccttaga

SEQ ID NO: 17091 - DNA, 21 bp, Homo sapiens
ccacacaaagygacaatagtg

SEQ ID NO: 17092 - DNA, 21 bp, Homo sapiens
gcagaacttaytattttgtga

SEQ ID NO: 17093 - DNA, 21 bp, Homo sapiens
aatattaatgygagttaactg

SEQ ID NO: 17094 - DNA, 21 bp, Homo sapiens
aagttcaactrtctctcaagt

SEQ ID NO: 17095 - DNA, 21 bp, Homo sapiens
ttctatgcaastcattgtggt

SEQ ID NO: 17096 - DNA, 21 bp, Homo sapiens
gggagggcacmcaacatctat

SEQ ID NO: 17097 - DNA, 21 bp, Homo sapiens
tattctcacaraatggacata

SEQ ID NO: 17098 - DNA, 21 bp, Homo sapiens
ttttgtgatawaacgttggag

SEQ ID NO: 17099 - DNA, 21 bp, Homo sapiens
gagaaatattsttacctcagg

SEQ ID NO: 17100 - DNA, 21 bp, Homo sapiens
atggggcctarttccctttat

SEQ ID NO: 17101 - DNA, 21 bp, Homo sapiens
cattcctatasctccaagctg

SEQ ID NO: 17102 - DNA, 21 bp, Homo sapiens
tgtagatcgayagataaatag

SEQ ID NO: 17103 - DNA, 21 bp, Homo sapiens
ctaaatttcgwtatagcttat

SEQ ID NO: 17104 - DNA, 21 bp, Homo sapiens
atgagaagaaytgacagctct

SEQ ID NO: 17105 - DNA, 21 bp, Homo sapiens
attcttactcsggaattggag

SEQ ID NO: 17106 - DNA, 21 bp, Homo sapiens
tatgtctgaawggtaattctg

SEQ ID NO: 17107 - DNA, 21 bp, Homo sapiens
tctttgtggtrgcaaagtagt

SEQ ID NO: 17108 - DNA, 21 bp, Homo sapiens
gcttttttccktgtagcaaag

SEQ ID NO: 17109 - DNA, 21 bp, Homo sapiens
tctgaagtgtrtttatgtaac

SEQ ID NO: 17110 - DNA, 21 bp, Homo sapiens
catatattgaygcacttgtta

SEQ ID NO: 17111 - DNA, 21 bp, Homo sapiens
tgaaatgcctrgattttacta

SEQ ID NO: 17112 - DNA, 21 bp, Homo sapiens
cttcttgttcyataaaatgac

SEQ ID NO: 17113 - DNA, 21 bp, Homo sapiens
tactctatttscacatgtgta

SEQ ID NO: 17114 - DNA, 21 bp, Homo sapiens
tgagggatgaygatactgagc

SEQ ID NO: 17115 - DNA, 21 bp, Homo sapiens
tgtttactgcytaactttgga

SEQ ID NO: 17116 - DNA, 21 bp, Homo sapiens
gaatcctatcraggatctcac

SEQ ID NO: 17117 - DNA, 21 bp, Homo sapiens
tcaaaaggaamgatactagca

SEQ ID NO: 17118 - DNA, 21 bp, Homo sapiens
cacaccccaayatcaccgtgg

SEQ ID NO: 17119 - DNA, 21 bp, Homo sapiens
aaactacttcygcctttgaat

SEQ ID NO: 17120 - DNA, 21 bp, Homo sapiens
tagttcaagastgttaaagaa

SEQ ID NO: 17121 - DNA, 21 bp, Homo sapiens
tggaactaacmgtggatttcc

SEQ ID NO: 17122 - DNA, 21 bp, Homo sapiens
aaactaaaaawtaactttgta

SEQ ID NO: 17123 - DNA, 21 bp, Homo sapiens
gataaaatctrtgaattaaag

SEQ ID NO: 17124 - DNA, 21 bp, Homo sapiens
agtttgtcctycttgattact

SEQ ID NO: 17125 - DNA, 21 bp, Homo sapiens
ttttaaaacawctgactggtt

SEQ ID NO: 17126 - DNA, 21 bp, Homo sapiens
ctattctcackgctttacaag

SEQ ID NO: 17127 - DNA, 21 bp, Homo sapiens
agttctataamagttataaat

SEQ ID NO: 17128 - DNA, 21 bp, Homo sapiens
ttctaaacatrtctctgatct

SEQ ID NO: 17129 - DNA, 21 bp, Homo sapiens
aagtggaaaaygacaggaact

SEQ ID NO: 17130 - DNA, 21 bp, Homo sapiens
caagttcaccsagtgaggatt

SEQ ID NO: 17131 - DNA, 21 bp, Homo sapiens
tctgtgtcaaygggatcccga

SEQ ID NO: 17132 - DNA, 21 bp, Homo sapiens
aatttgcaccrcttcagccag

SEQ ID NO: 17133 - DNA, 21 bp, Homo sapiens
agaaggaagasaggtgcacag

SEQ ID NO: 17134 - DNA, 21 bp, Homo sapiens
gagactttttwaaaaaaactt

SEQ ID NO: 17135 - DNA, 21 bp, Homo sapiens
gaaagtgatgsccccgaggag

SEQ ID NO: 17136 - DNA, 21 bp, Homo sapiens
gtacccgaatrtacagttcaa

SEQ ID NO: 17137 - DNA, 21 bp, Homo sapiens
cagaggtgggytctccttcat

SEQ ID NO: 17138 - DNA, 21 bp, Homo sapiens
accaacagackctcaggactg

SEQ ID NO: 17139 - DNA, 21 bp, Homo sapiens
cggagaaagcyggcactattg

SEQ ID NO: 17140 - DNA, 21 bp, Homo sapiens
tggatgtcttrtaagaagcac

SEQ ID NO: 17141 - DNA, 21 bp, Homo sapiens
tgaattaacayagcacatctg

SEQ ID NO: 17142 - DNA, 21 bp, Homo sapiens
tgaaagaggarctagaggaga

SEQ ID NO: 17143 - DNA, 21 bp, Homo sapiens
gagaatgaagmatcggtcagg

SEQ ID NO: 17144 - DNA, 21 bp, Homo sapiens
aataaaacaaygaaaccacta

SEQ ID NO: 17145 - DNA, 21 bp, Homo sapiens
ccactttgtastctctgtttc

SEQ ID NO: 17146 - DNA, 21 bp, Homo sapiens
agggaaccaaytctgagattc

SEQ ID NO: 17147 - DNA, 21 bp, Homo sapiens
atcaaccctgsggtcaccctc

SEQ ID NO: 17148 - DNA, 21 bp, Homo sapiens
ccataagtagrccaggggtat

SEQ ID NO: 17149 - DNA, 21 bp, Homo sapiens
tgacaagagartttcctgggt

SEQ ID NO: 17150 - DNA, 21 bp, Homo sapiens
caacctaagtytgaccctcac

SEQ ID NO: 17151 - DNA, 21 bp, Homo sapiens
cacagtccacrtacaggcaaa

SEQ ID NO: 17152 - DNA, 21 bp, Homo sapiens
agcctcactgycaaatgagga

SEQ ID NO: 17153 - DNA, 21 bp, Homo sapiens
agatttagacwccatatagca

SEQ ID NO: 17154 - DNA, 21 bp, Homo sapiens
gttgcattaaracttcagcct

SEQ ID NO: 17155 - DNA, 21 bp, Homo sapiens
caaggattagkttcctctgaa

SEQ ID NO: 17156 - DNA, 21 bp, Homo sapiens
atttagaggcyctactgcccg

SEQ ID NO: 17157 - DNA, 21 bp, Homo sapiens
actcggcctcytagcccctgc

SEQ ID NO: 17158 - DNA, 21 bp, Homo sapiens
tagaaaagacraattccaaac

SEQ ID NO: 17159 - DNA, 21 bp, Homo sapiens
tttggaaaatrtagtcactgc

SEQ ID NO: 17160 - DNA, 21 bp, Homo sapiens
aagctcccagktttttttata

SEQ ID NO: 17161 - DNA, 21 bp, Homo sapiens
ctagaacctaycctctgcaac

SEQ ID NO: 17162 - DNA, 21 bp, Homo sapiens
agagaccaccsacttgggagc

SEQ ID NO: 17163 - DNA, 21 bp, Homo sapiens
ggttctgcctygcttgctaat

SEQ ID NO: 17164 - DNA, 21 bp, Homo sapiens
gtctcaggtcrttggttgtat

SEQ ID NO: 17165 - DNA, 21 bp, Homo sapiens
ttcccttggcygtcgctggca

SEQ ID NO: 17166 - DNA, 21 bp, Homo sapiens
tcaagtcaaayatctttcttt

SEQ ID NO: 17167 - DNA, 21 bp, Homo sapiens
gacagctccayagaattgtct

SEQ ID NO: 17168 - DNA, 21 bp, Homo sapiens
cagagggatcrttccagggaa

SEQ ID NO: 17169 - DNA, 21 bp, Homo sapiens
atgtttgggaygatgagtgag

SEQ ID NO: 17170 - DNA, 21 bp, Homo sapiens
tacactgtcayatgattagga

SEQ ID NO: 17171 - DNA, 21 bp, Homo sapiens
actctccacaytccctctatt

SEQ ID NO: 17172 - DNA, 21 bp, Homo sapiens
agttcctggarggagttgaaa

SEQ ID NO: 17173 - DNA, 21 bp, Homo sapiens
gggtgcaatcractgccaaag

SEQ ID NO: 17174 - DNA, 21 bp, Homo sapiens
cattaactgcrcctgaagtgg

SEQ ID NO: 17175 - DNA, 21 bp, Homo sapiens
atagatgatgrtcaattccta

SEQ ID NO: 17176 - DNA, 21 bp, Homo sapiens
atgggtttaasttttaccttt

SEQ ID NO: 17177 - DNA, 21 bp, Homo sapiens
aaagattgaaragtttgaata

SEQ ID NO: 17178 - DNA, 21 bp, Homo sapiens
tcgcataggtytctagatcaa

SEQ ID NO: 17179 - DNA, 21 bp, Homo sapiens
acaatgttttkttggtgtgtt

SEQ ID NO: 17180 - DNA, 21 bp, Homo sapiens
gtgacctataytatgatttcc

SEQ ID NO: 17181 - DNA, 21 bp, Homo sapiens
ggagctgtttygacactgtgt

SEQ ID NO: 17182 - DNA, 21 bp, Homo sapiens
cttgatttcaragaagttgtc

SEQ ID NO: 17183 - DNA, 21 bp, Homo sapiens
agaccagatayggcaggtttg

SEQ ID NO: 17184 - DNA, 21 bp, Homo sapiens
cagcaaagcarttattattct

SEQ ID NO: 17185 - DNA, 21 bp, Homo sapiens
tgaatctgtcstatttactag

SEQ ID NO: 17186 - DNA, 21 bp, Homo sapiens
tatagcatcartataaattag

SEQ ID NO: 17187 - DNA, 21 bp, Homo sapiens
ttatatgcacrtgcacctcag

SEQ ID NO: 17188 - DNA, 21 bp, Homo sapiens
aactactcgayttgggaaagg

SEQ ID NO: 17189 - DNA, 21 bp, Homo sapiens
ctgtggctcaragagacttcg

SEQ ID NO: 17190 - DNA, 21 bp, Homo sapiens
cagctcgctcmtcctgagaaa

SEQ ID NO: 17191 - DNA, 21 bp, Homo sapiens
ttaggagccayaggccttgca

SEQ ID NO: 17192 - DNA, 21 bp, Homo sapiens
cagcttagcasccccaggcgg

SEQ ID NO: 17193 - DNA, 21 bp, Homo sapiens
cattcatgccrttgaagtcca

SEQ ID NO: 17194 - DNA, 21 bp, Homo sapiens
gggacttagcrtagttttctt

SEQ ID NO: 17195 - DNA, 21 bp, Homo sapiens
caaaatattaygctgaacgaa

SEQ ID NO: 17196 - DNA, 21 bp, Homo sapiens
tgactattccsccattgaatt

SEQ ID NO: 17197 - DNA, 21 bp, Homo sapiens
cgcctatgaayaggaggtttg

SEQ ID NO: 17198 - DNA, 21 bp, Homo sapiens
acgctccttcrgagctcactg

SEQ ID NO: 17199 - DNA, 21 bp, Homo sapiens
tcttgttttaygttctttttc

SEQ ID NO: 17200 - DNA, 21 bp, Homo sapiens
tttgtccattmctccatggac

SEQ ID NO: 17201 - DNA, 21 bp, Homo sapiens
gagaagtgtcwcaaataagca

SEQ ID NO: 17202 - DNA, 21 bp, Homo sapiens
gtttactagcscacaaaagat

SEQ ID NO: 17203 - DNA, 21 bp, Homo sapiens
aaaacgctatmtctgagggtt

SEQ ID NO: 17204 - DNA, 21 bp, Homo sapiens
cagaactctgytttaaacaac

SEQ ID NO: 17205 - DNA, 21 bp, Homo sapiens
ttagctatgcrtctaccagcc

SEQ ID NO: 17206 - DNA, 21 bp, Homo sapiens
aagagacagargccttgttat

SEQ ID NO: 17207 - DNA, 21 bp, Homo sapiens
agtttagcaaygatataatct

SEQ ID NO: 17208 - DNA, 21 bp, Homo sapiens
acttaacactrtttctcttag

SEQ ID NO: 17209 - DNA, 21 bp, Homo sapiens
cccagatgaaytatgcagcta

SEQ ID NO: 17210 - DNA, 21 bp, Homo sapiens
tgaggggtatyaaagtatgac

SEQ ID NO: 17211 - DNA, 21 bp, Homo sapiens
accacttgtakatccagatta

SEQ ID NO: 17212 - DNA, 21 bp, Homo sapiens
atataaaaagyagccaaatgt

SEQ ID NO: 17213 - DNA, 21 bp, Homo sapiens
cagccttcagmgtcccgtagg

SEQ ID NO: 17214 - DNA, 21 bp, Homo sapiens
gtggacctatraaagtatccg

SEQ ID NO: 17215 - DNA, 21 bp, Homo sapiens
tcattgaacaycattgaagaa

SEQ ID NO: 17216 - DNA, 21 bp, Homo sapiens
accagtctcartgtcttaagc

SEQ ID NO: 17217 - DNA, 21 bp, Homo sapiens
ttacaaagcaygtggagtcag

SEQ ID NO: 17218 - DNA, 21 bp, Homo sapiens
ctagtgccaartatataactg

SEQ ID NO: 17219 - DNA, 21 bp, Homo sapiens
tccatctttcrtcatcattaa

SEQ ID NO: 17220 - DNA, 21 bp, Homo sapiens
gtgagtagtgytttgggtgaa

SEQ ID NO: 17221 - DNA, 21 bp, Homo sapiens
taaatattacyggttccataa

SEQ ID NO: 17222 - DNA, 21 bp, Homo sapiens
gattccctccygattttgcac

SEQ ID NO: 17223 - DNA, 21 bp, Homo sapiens
acccaaaaaaygtacagtaaa

SEQ ID NO: 17224 - DNA, 21 bp, Homo sapiens
tgccgctgctrcatagaagac

SEQ ID NO: 17225 - DNA, 21 bp, Homo sapiens
tgagggtcggmgtatttgcca

SEQ ID NO: 17226 - DNA, 21 bp, Homo sapiens
ttatttttttycttggcagtc

SEQ ID NO: 17227 - DNA, 21 bp, Homo sapiens
gagattttttmgtagagaaga

SEQ ID NO: 17228 - DNA, 21 bp, Homo sapiens
cactgggtgaytggcccttct

SEQ ID NO: 17229 - DNA, 21 bp, Homo sapiens
aagctataatraatcaatttt

SEQ ID NO: 17230 - DNA, 21 bp, Homo sapiens
caacaacaacmaagtatgttc

SEQ ID NO: 17231 - DNA, 21 bp, Homo sapiens
ctgggttaaartttggagtct

SEQ ID NO: 17232 - DNA, 21 bp, Homo sapiens
tatgctgttgmcaatccataa

SEQ ID NO: 17233 - DNA, 21 bp, Homo sapiens
cacctactggrcctcttgcac

SEQ ID NO: 17234 - DNA, 21 bp, Homo sapiens
ttcaaggttgrctcacccaag

SEQ ID NO: 17235 - DNA, 21 bp, Homo sapiens
cagaaaccacracataaacca

SEQ ID NO: 17236 - DNA, 21 bp, Homo sapiens
gtgtgtcctcrtgttctagaa

SEQ ID NO: 17237 - DNA, 21 bp, Homo sapiens
cagttatgttytgtgccatat

SEQ ID NO: 17238 - DNA, 21 bp, Homo sapiens
tgaaaaaattrggattcaaat

SEQ ID NO: 17239 - DNA, 21 bp, Homo sapiens
agctttgagtrtctattgtgt

SEQ ID NO: 17240 - DNA, 21 bp, Homo sapiens
gcaggaataaytgagaatggg

SEQ ID NO: 17241 - DNA, 21 bp, Homo sapiens
gagaatatctwgaactaggta

SEQ ID NO: 17242 - DNA, 21 bp, Homo sapiens
taatactcaawtaacataatt

SEQ ID NO: 17243 - DNA, 21 bp, Homo sapiens
tatacatccgyagcagaatca

SEQ ID NO: 17244 - DNA, 21 bp, Homo sapiens
agttcaaatayaatctcttgc

SEQ ID NO: 17245 - DNA, 21 bp, Homo sapiens
aaagggcagakatttataaga

SEQ ID NO: 17246 - DNA, 21 bp, Homo sapiens
gactgcattgyatagacctat

SEQ ID NO: 17247 - DNA, 21 bp, Homo sapiens
tctgccagatraataatttgc

SEQ ID NO: 17248 - DNA, 21 bp, Homo sapiens
gactggtgcarttgaaaatat

SEQ ID NO: 17249 - DNA, 21 bp, Homo sapiens
attgtttatgktatttatgca

SEQ ID NO: 17250 - DNA, 21 bp, Homo sapiens
caaagggataygggaaaaaca

SEQ ID NO: 17251 - DNA, 21 bp, Homo sapiens
aaggtcagtgytttttatgcc

SEQ ID NO: 17252 - DNA, 21 bp, Homo sapiens
gtcactgtggyacaactcact

SEQ ID NO: 17253 - DNA, 21 bp, Homo sapiens
agtattttctycaatgctaag

SEQ ID NO: 17254 - DNA, 21 bp, Homo sapiens
gggggattaayttagcccatt

SEQ ID NO: 17255 - DNA, 21 bp, Homo sapiens
cctgttcttgktttctatggt

SEQ ID NO: 17256 - DNA, 21 bp, Homo sapiens
tatgctcatgraaaccaccaa

SEQ ID NO: 17257 - DNA, 21 bp, Homo sapiens
atattgcagcrgagggtagtt

SEQ ID NO: 17258 - DNA, 21 bp, Homo sapiens
gagcttgtccraagtaatttt

SEQ ID NO: 17259 - DNA, 21 bp, Homo sapiens
ggccgttcacrgtgatcagct

SEQ ID NO: 17260 - DNA, 21 bp, Homo sapiens
aaacccaaatygtaattttct

SEQ ID NO: 17261 - DNA, 21 bp, Homo sapiens
ttcttcagackcacaccttct

SEQ ID NO: 17262 - DNA, 21 bp, Homo sapiens
atattcttaaytttacctgcc

SEQ ID NO: 17263 - DNA, 21 bp, Homo sapiens
gaagatgatcrccaaactcag

SEQ ID NO: 17264 - DNA, 21 bp, Homo sapiens
ctttctcgacragcaagggta

SEQ ID NO: 17265 - DNA, 21 bp, Homo sapiens
aatgaaacagkattgatacaa

SEQ ID NO: 17266 - DNA, 21 bp, Homo sapiens
acatttcctgsgtccaagagg

SEQ ID NO: 17267 - DNA, 21 bp, Homo sapiens
taataaatgtktggtgactgt

SEQ ID NO: 17268 - DNA, 21 bp, Homo sapiens
tttgagaagcrctcagtaaat

SEQ ID NO: 17269 - DNA, 21 bp, Homo sapiens
tcttctaatasctgacccatt

SEQ ID NO: 17270 - DNA, 21 bp, Homo sapiens
taagcaggccrggacccagga

SEQ ID NO: 17271 - DNA, 21 bp, Homo sapiens
acaaggacaamtctttggtag

SEQ ID NO: 17272 - DNA, 21 bp, Homo sapiens
tcaacatctcwttccattccc

SEQ ID NO: 17273 - DNA, 21 bp, Homo sapiens
gattctggtgyttctgctcaa

SEQ ID NO: 17274 - DNA, 21 bp, Homo sapiens
ctggctgcggygagactgcta

SEQ ID NO: 17275 - DNA, 21 bp, Homo sapiens
ataatgtttcycaagaagtgt

SEQ ID NO: 17276 - DNA, 21 bp, Homo sapiens
ttttagttccratccctggtt

SEQ ID NO: 17277 - DNA, 21 bp, Homo sapiens
cttcattcccygtacaaaata

SEQ ID NO: 17278 - DNA, 21 bp, Homo sapiens
tgtgttctaawgctctgaggt

SEQ ID NO: 17279 - DNA, 21 bp, Homo sapiens
attggaatgtraaaatctcta

SEQ ID NO: 17280 - DNA, 21 bp, Homo sapiens
atagaactttwtatcagaact

SEQ ID NO: 17281 - DNA, 21 bp, Homo sapiens
atacatttgarttatgaaaga

SEQ ID NO: 17282 - DNA, 21 bp, Homo sapiens
gagaaaattcygcttttattt

SEQ ID NO: 17283 - DNA, 21 bp, Homo sapiens
ggcagtatatwgattaaactg

SEQ ID NO: 17284 - DNA, 21 bp, Homo sapiens
gcttagaagaktaggtaagtt

SEQ ID NO: 17285 - DNA, 21 bp, Homo sapiens
caaatatgagkgaagaggcat

SEQ ID NO: 17286 - DNA, 21 bp, Homo sapiens
acaggtgtccrtgccaggtga

SEQ ID NO: 17287 - DNA, 21 bp, Homo sapiens
ctcttctgtayggcttggatt

SEQ ID NO: 17288 - DNA, 21 bp, Homo sapiens
acggaccactstggaggagca

SEQ ID NO: 17289 - DNA, 21 bp, Homo sapiens
ttattgcatgrtcgggtaaga

SEQ ID NO: 17290 - DNA, 21 bp, Homo sapiens
gaatgatatamatcaagctaa

SEQ ID NO: 17291 - DNA, 21 bp, Homo sapiens
atagctgtcaygccagagaga

SEQ ID NO: 17292 - DNA, 21 bp, Homo sapiens
aagcatctaartttctgagta

SEQ ID NO: 17293 - DNA, 21 bp, Homo sapiens
gttttgagctwgatgtcttgt

SEQ ID NO: 17294 - DNA, 21 bp, Homo sapiens
tgcttttgagyccagggtaga

SEQ ID NO: 17295 - DNA, 21 bp, Homo sapiens
ttcaaaacccrtaaacacatc

SEQ ID NO: 17296 - DNA, 21 bp, Homo sapiens
ctaccttctcyggtagatgct

SEQ ID NO: 17297 - DNA, 21 bp, Homo sapiens
tacagcaaagygttgtcatct

SEQ ID NO: 17298 - DNA, 21 bp, Homo sapiens
tgattttgtaycttgctaagg

SEQ ID NO: 17299 - DNA, 21 bp, Homo sapiens
tgatgctgagrcgattatgaa

SEQ ID NO: 17300 - DNA, 21 bp, Homo sapiens
ataaagattarcgaatgaagt

SEQ ID NO: 17301 - DNA, 21 bp, Homo sapiens
catccacatcyctccaccctt

SEQ ID NO: 17302 - DNA, 21 bp, Homo sapiens
cttatgattcragtatatgga

SEQ ID NO: 17303 - DNA, 21 bp, Homo sapiens
ttgggagtcaycgtgctgtga

SEQ ID NO: 17304 - DNA, 21 bp, Homo sapiens
ctcctgccgasaactattgag

SEQ ID NO: 17305 - DNA, 21 bp, Homo sapiens
cgacacttctytttggtttcc

SEQ ID NO: 17306 - DNA, 21 bp, Homo sapiens
atggtacaggraagagtgtgt

SEQ ID NO: 17307 - DNA, 21 bp, Homo sapiens
ctggtttttcrttttctgcaa

SEQ ID NO: 17308 - DNA, 21 bp, Homo sapiens
tattttcagcyttcagtagtg

SEQ ID NO: 17309 - DNA, 21 bp, Homo sapiens
tttactagaamtacttgaatt

SEQ ID NO: 17310 - DNA, 21 bp, Homo sapiens
aatggatgaawagctggacgg

SEQ ID NO: 17311 - DNA, 21 bp, Homo sapiens
gaagtcttctyacctggtgca

SEQ ID NO: 17312 - DNA, 21 bp, Homo sapiens
ttaacctagcratttactctt

SEQ ID NO: 17313 - DNA, 21 bp, Homo sapiens
gatttatttcrtttccaaggg

SEQ ID NO: 17314 - DNA, 21 bp, Homo sapiens
ccaacttaaaytggaatcttt

SEQ ID NO: 17315 - DNA, 21 bp, Homo sapiens
ttaatgtcaarggacctttcc

SEQ ID NO: 17316 - DNA, 21 bp, Homo sapiens
agtctatcacmatacatttcc

SEQ ID NO: 17317 - DNA, 21 bp, Homo sapiens
ttaattctaarggaacacatc

SEQ ID NO: 17318 - DNA, 21 bp, Homo sapiens
agcctcactcytttggaggta

SEQ ID NO: 17319 - DNA, 21 bp, Homo sapiens
caggtctcggyaaaagcagat

SEQ ID NO: 17320 - DNA, 21 bp, Homo sapiens
ggacagcaacmacatttatca

SEQ ID NO: 17321 - DNA, 21 bp, Homo sapiens
gcgagttcctwgaggaaagga

SEQ ID NO: 17322 - DNA, 21 bp, Homo sapiens
gcatttttatrtaaaggataa

SEQ ID NO: 17323 - DNA, 21 bp, Homo sapiens
taatatggctstttcataaaa

SEQ ID NO: 17324 - DNA, 21 bp, Homo sapiens
agcattagaawatttcctgag

SEQ ID NO: 17325 - DNA, 21 bp, Homo sapiens
agctgtgagarttcagtgaga

SEQ ID NO: 17326 - DNA, 21 bp, Homo sapiens
aagagatgccrgcagcagagg

SEQ ID NO: 17327 - DNA, 21 bp, Homo sapiens
ggcggccccasgatcaaggtc

SEQ ID NO: 17328 - DNA, 21 bp, Homo sapiens
gagtcctcagwgcaattgtcc

SEQ ID NO: 17329 - DNA, 21 bp, Homo sapiens
gcctcctgctrtcctggcaag

SEQ ID NO: 17330 - DNA, 21 bp, Homo sapiens
gactgcctgtyttccagccat

SEQ ID NO: 17331 - DNA, 21 bp, Homo sapiens
ctatgacccaytgagtaaaag

SEQ ID NO: 17332 - DNA, 21 bp, Homo sapiens
gaaaagtttcrtcacaacctt

SEQ ID NO: 17333 - DNA, 21 bp, Homo sapiens
caggtggaccrtccacacgca

SEQ ID NO: 17334 - DNA, 21 bp, Homo sapiens
ctacatttackagacaccgat

SEQ ID NO: 17335 - DNA, 21 bp, Homo sapiens
cgcggggtcgyggttcctgcg

SEQ ID NO: 17336 - DNA, 21 bp, Homo sapiens
ttctgcttccytctagtgtgt

SEQ ID NO: 17337 - DNA, 21 bp, Homo sapiens
gtaattttaaycagaaaagtc

SEQ ID NO: 17338 - DNA, 21 bp, Homo sapiens
agtgaactctsgattaacaac

SEQ ID NO: 17339 - DNA, 21 bp, Homo sapiens
acatttaaaaragaagatctg

SEQ ID NO: 17340 - DNA, 21 bp, Homo sapiens
aacatgtatcmcacatttcca

SEQ ID NO: 17341 - DNA, 21 bp, Homo sapiens
gcagtaggagyccatggacct

SEQ ID NO: 17342 - DNA, 21 bp, Homo sapiens
ataggaatcarcctgaacttg

SEQ ID NO: 17343 - DNA, 21 bp, Homo sapiens
ttctgattacrtactttgtta

SEQ ID NO: 17344 - DNA, 21 bp, Homo sapiens
aattttaagarttgagtttta

SEQ ID NO: 17345 - DNA, 21 bp, Homo sapiens
ccctcccacaycgtggcagcc

SEQ ID NO: 17346 - DNA, 21 bp, Homo sapiens
aatctgcttawtattaatgtg

SEQ ID NO: 17347 - DNA, 21 bp, Homo sapiens
tttgctttgtktccttttagg

SEQ ID NO: 17348 - DNA, 21 bp, Homo sapiens
atgtcttaaaygcaaatgagg

SEQ ID NO: 17349 - DNA, 21 bp, Homo sapiens
gcacttcatgwatgtccgtta

SEQ ID NO: 17350 - DNA, 21 bp, Homo sapiens
gacaacataawgtagtagaaa

SEQ ID NO: 17351 - DNA, 21 bp, Homo sapiens
ggagaatgatrtatgggttga

SEQ ID NO: 17352 - DNA, 21 bp, Homo sapiens
gccaagaacasttggtttcct

SEQ ID NO: 17353 - DNA, 21 bp, Homo sapiens
tcattgttctstctggcataa

SEQ ID NO: 17354 - DNA, 21 bp, Homo sapiens
aaattgtcctrgaagcacaaa

SEQ ID NO: 17355 - DNA, 21 bp, Homo sapiens
gaaaaatgtcscatctacagg

SEQ ID NO: 17356 - DNA, 21 bp, Homo sapiens
gccatatgacrtgatccctaa

SEQ ID NO: 17357 - DNA, 21 bp, Homo sapiens
tgagtgttcaytgccttttta

SEQ ID NO: 17358 - DNA, 21 bp, Homo sapiens
agacttccagmgacagttgaa

SEQ ID NO: 17359 - DNA, 21 bp, Homo sapiens
gagagaaataratgcatatag

SEQ ID NO: 17360 - DNA, 21 bp, Homo sapiens
gatgactaatycttatgttgt

SEQ ID NO: 17361 - DNA, 21 bp, Homo sapiens
attcaggtggkcctaacccta

SEQ ID NO: 17362 - DNA, 21 bp, Homo sapiens
aatacaccaarccatactaac

SEQ ID NO: 17363 - DNA, 21 bp, Homo sapiens
aaagttagccraacatagtgg

SEQ ID NO: 17364 - DNA, 21 bp, Homo sapiens
ctgtactttawagtttcactc

SEQ ID NO: 17365 - DNA, 21 bp, Homo sapiens
gtttaattcaytttttgccca

SEQ ID NO: 17366 - DNA, 21 bp, Homo sapiens
ctcttgtcctragacagttca

SEQ ID NO: 17367 - DNA, 21 bp, Homo sapiens
tttggatatcyagaaaagctt

SEQ ID NO: 17368 - DNA, 21 bp, Homo sapiens
ttcaggaaaayatctgggatg

SEQ ID NO: 17369 - DNA, 21 bp, Homo sapiens
atgcagctgaytactgtctag

SEQ ID NO: 17370 - DNA, 21 bp, Homo sapiens
tcttagctacrtatccctcaa

SEQ ID NO: 17371 - DNA, 21 bp, Homo sapiens
tagttccctayggactataga

SEQ ID NO: 17372 - DNA, 21 bp, Homo sapiens
ttagtgttacrttttaaagtc

SEQ ID NO: 17373 - DNA, 21 bp, Homo sapiens
tggtcataccwaaatttgttc

SEQ ID NO: 17374 - DNA, 21 bp, Homo sapiens
tttgtaggtakgaccttcttt

SEQ ID NO: 17375 - DNA, 21 bp, Homo sapiens
cttcatttccygcagccatcc

SEQ ID NO: 17376 - DNA, 21 bp, Homo sapiens
ggaaaagttasacagatcacc

SEQ ID NO: 17377 - DNA, 21 bp, Homo sapiens
ttttaatcccygtctatattt

SEQ ID NO: 17378 - DNA, 21 bp, Homo sapiens
tttgatgaatyttttactctt

SEQ ID NO: 17379 - DNA, 21 bp, Homo sapiens
gaaagatacakggatacctag

SEQ ID NO: 17380 - DNA, 21 bp, Homo sapiens
tctacaatatrtaaatgtgaa

SEQ ID NO: 17381 - DNA, 21 bp, Homo sapiens
cttaatattckttatacattt

SEQ ID NO: 17382 - DNA, 21 bp, Homo sapiens
tcttctcttcyagcaacatat

SEQ ID NO: 17383 - DNA, 21 bp, Homo sapiens
ctgaagcccaratgctgactg

SEQ ID NO: 17384 - DNA, 21 bp, Homo sapiens
gcgttcagagrtataagatct

SEQ ID NO: 17385 - DNA, 21 bp, Homo sapiens
tgtggatcctygcagcagtgc

SEQ ID NO: 17386 - DNA, 21 bp, Homo sapiens
aaaaggttagrccaaaaaatt

SEQ ID NO: 17387 - DNA, 21 bp, Homo sapiens
gctgtaaaccrccttgctcca

SEQ ID NO: 17388 - DNA, 21 bp, Homo sapiens
tgtagtcctcrttcaaaaaag

SEQ ID NO: 17389 - DNA, 21 bp, Homo sapiens
aactcctataycatactcctg

SEQ ID NO: 17390 - DNA, 21 bp, Homo sapiens
caggccgatcyccgctgtcac

SEQ ID NO: 17391 - DNA, 21 bp, Homo sapiens
ctgccacttaygccaatccct

SEQ ID NO: 17392 - DNA, 21 bp, Homo sapiens
ttctctattgrgaactccaat

SEQ ID NO: 17393 - DNA, 21 bp, Homo sapiens
cttgctccctstgtgtcaggt

SEQ ID NO: 17394 - DNA, 21 bp, Homo sapiens
atagcatcccrctttgaaaca

SEQ ID NO: 17395 - DNA, 21 bp, Homo sapiens
atgaaaggttwtgcttcactt

SEQ ID NO: 17396 - DNA, 21 bp, Homo sapiens
tgactggctaytactactaca

SEQ ID NO: 17397 - DNA, 21 bp, Homo sapiens
gtcacttctgstaatggcctt

SEQ ID NO: 17398 - DNA, 21 bp, Homo sapiens
ttgtctttgtmggaagtcttg

SEQ ID NO: 17399 - DNA, 21 bp, Homo sapiens
gaggtatgggyagcacttaga

SEQ ID NO: 17400 - DNA, 21 bp, Homo sapiens
ccacaaattgwctactcttaa

SEQ ID NO: 17401 - DNA, 21 bp, Homo sapiens
tgatggaagargctgcccgtt

SEQ ID NO: 17402 - DNA, 21 bp, Homo sapiens
tgtggaggtcrttgagaaagg

SEQ ID NO: 17403 - DNA, 21 bp, Homo sapiens
gttacccactkctgatacctg

SEQ ID NO: 17404 - DNA, 21 bp, Homo sapiens
ccattatcccyggaagcctac

SEQ ID NO: 17405 - DNA, 21 bp, Homo sapiens
gaaatcacacraatcataaat

SEQ ID NO: 17406 - DNA, 21 bp, Homo sapiens
ctggctctgayacatatgcca

SEQ ID NO: 17407 - DNA, 21 bp, Homo sapiens
aggacacaagrtgtttggctg

SEQ ID NO: 17408 - DNA, 21 bp, Homo sapiens
gctgacagtgmaatgtgtgcc

SEQ ID NO: 17409 - DNA, 21 bp, Homo sapiens
aggggtgtgayacagaaaata

SEQ ID NO: 17410 - DNA, 21 bp, Homo sapiens
taaattcaaascagcagtata

SEQ ID NO: 17411 - DNA, 21 bp, Homo sapiens
tggccagagcwgtagccaaca

SEQ ID NO: 17412 - DNA, 21 bp, Homo sapiens
tcacagcaagmtaccctgtat

SEQ ID NO: 17413 - DNA, 21 bp, Homo sapiens
agcacttcctygcaaagcagc

SEQ ID NO: 17414 - DNA, 21 bp, Homo sapiens
agacaaacagwgtgccgaggt

SEQ ID NO: 17415 - DNA, 21 bp, Homo sapiens
attctgaagcragaccatcct

SEQ ID NO: 17416 - DNA, 21 bp, Homo sapiens
tatacacacaktggtcctgac

SEQ ID NO: 17417 - DNA, 21 bp, Homo sapiens
gattttcctcstatttcccac

SEQ ID NO: 17418 - DNA, 21 bp, Homo sapiens
aaagttgtgtmatcattgtgt

SEQ ID NO: 17419 - DNA, 21 bp, Homo sapiens
ctgctctaagrtttctatcaa

SEQ ID NO: 17420 - DNA, 21 bp, Homo sapiens
tgctttatttsacccatataa

SEQ ID NO: 17421 - DNA, 21 bp, Homo sapiens
agtaagggaasgagctcccag

SEQ ID NO: 17422 - DNA, 21 bp, Homo sapiens
agctctcactstctactataa

SEQ ID NO: 17423 - DNA, 21 bp, Homo sapiens
atcccctttgycctttcagga

SEQ ID NO: 17424 - DNA, 21 bp, Homo sapiens
cgatggattcmaatgtaccat

SEQ ID NO: 17425 - DNA, 21 bp, Homo sapiens
ctttttttaaygcacagaaaa

SEQ ID NO: 17426 - DNA, 21 bp, Homo sapiens
ggcaattacayagattttcac

SEQ ID NO: 17427 - DNA, 21 bp, Homo sapiens
caactcttttytgccaaattc

SEQ ID NO: 17428 - DNA, 21 bp, Homo sapiens
gaagcaaggargagtattagg

SEQ ID NO: 17429 - DNA, 21 bp, Homo sapiens
gtaggaatcarcctaacagat

SEQ ID NO: 17430 - DNA, 21 bp, Homo sapiens
cactggcgtcrgaaaagttcc

SEQ ID NO: 17431 - DNA, 21 bp, Homo sapiens
ccagaaaaagyacccaagtct

SEQ ID NO: 17432 - DNA, 21 bp, Homo sapiens
tcgtctgcttmttgttctctt

SEQ ID NO: 17433 - DNA, 21 bp, Homo sapiens
aagttctggcscttcccttag

SEQ ID NO: 17434 - DNA, 21 bp, Homo sapiens
cgacagagccragacttgaac

SEQ ID NO: 17435 - DNA, 21 bp, Homo sapiens
ggataagtcaktcgcacaagg

SEQ ID NO: 17436 - DNA, 21 bp, Homo sapiens
tagagtctgcygcacgagtgt

SEQ ID NO: 17437 - DNA, 21 bp, Homo sapiens
tatgagcgggktttaggttga

SEQ ID NO: 17438 - DNA, 21 bp, Homo sapiens
caacctaattrtgtttttgca

SEQ ID NO: 17439 - DNA, 21 bp, Homo sapiens
gtcttcatgtwttctagagta

SEQ ID NO: 17440 - DNA, 21 bp, Homo sapiens
gcacaattcamtccccaaaaa

SEQ ID NO: 17441 - DNA, 21 bp, Homo sapiens
accgtttcccrtgacaacagt

SEQ ID NO: 17442 - DNA, 21 bp, Homo sapiens
tttgagggacrtggagattgg

SEQ ID NO: 17443 - DNA, 21 bp, Homo sapiens
caccttctctkttgcttcttc

SEQ ID NO: 17444 - DNA, 21 bp, Homo sapiens
cctcatctaaygagtttgaac

SEQ ID NO: 17445 - DNA, 21 bp, Homo sapiens
taatgccgttwtcagtacatt

SEQ ID NO: 17446 - DNA, 21 bp, Homo sapiens
cagcttctaarcaggattcaa

SEQ ID NO: 17447 - DNA, 21 bp, Homo sapiens
aggaaatgcaktgagatttgt

SEQ ID NO: 17448 - DNA, 21 bp, Homo sapiens
tttcacatctyttgaattacg

SEQ ID NO: 17449 - DNA, 21 bp, Homo sapiens
aaattcagccrggaggaaaca

SEQ ID NO: 17450 - DNA, 21 bp, Homo sapiens
caacagttacsagaccttctc

SEQ ID NO: 17451 - DNA, 21 bp, Homo sapiens
tttgacttgaygttttgcctt

SEQ ID NO: 17452 - DNA, 21 bp, Homo sapiens
gttcccacttstaaggcaggc

SEQ ID NO: 17453 - DNA, 21 bp, Homo sapiens
gggccaccatsttgctgccag

SEQ ID NO: 17454 - DNA, 21 bp, Homo sapiens
tctcacactgkttctgttagc

SEQ ID NO: 17455 - DNA, 21 bp, Homo sapiens
agtaggagccrccgacacctg

SEQ ID NO: 17456 - DNA, 21 bp, Homo sapiens
ttgagatgttrtgtacctcac

SEQ ID NO: 17457 - DNA, 21 bp, Homo sapiens
tttcacagaayagtttttctc

SEQ ID NO: 17458 - DNA, 21 bp, Homo sapiens
gttttctgatstcttggtatc

SEQ ID NO: 17459 - DNA, 21 bp, Homo sapiens
tgggtctagargatgactggt

SEQ ID NO: 17460 - DNA, 21 bp, Homo sapiens
ctgagcatgtyatccttaaca

SEQ ID NO: 17461 - DNA, 21 bp, Homo sapiens
tgtaatccttsaatcataatt

SEQ ID NO: 17462 - DNA, 21 bp, Homo sapiens
acagtttggcytaatgtatac

SEQ ID NO: 17463 - DNA, 21 bp, Homo sapiens
ggcaagaaagkgtttggatta

SEQ ID NO: 17464 - DNA, 21 bp, Homo sapiens
cattgcaaccsgccattcagc

SEQ ID NO: 17465 - DNA, 21 bp, Homo sapiens
aggcaaaatgmaagctagaac

SEQ ID NO: 17466 - DNA, 21 bp, Homo sapiens
atgactaatasagcatttgaa

SEQ ID NO: 17467 - DNA, 21 bp, Homo sapiens
agctgcttatrttgtatacac

SEQ ID NO: 17468 - DNA, 21 bp, Homo sapiens
gagagaataawcaaggaagtt

SEQ ID NO: 17469 - DNA, 21 bp, Homo sapiens
cttgtacttcytcctagccct

SEQ ID NO: 17470 - DNA, 21 bp, Homo sapiens
tgatccaaaayactaaaatta

SEQ ID NO: 17471 - DNA, 21 bp, Homo sapiens
cagaaggcaamtatattctgc

SEQ ID NO: 17472 - DNA, 21 bp, Homo sapiens
ctgcttatccstttttttctt

SEQ ID NO: 17473 - DNA, 21 bp, Homo sapiens
gatagagaaamgtagaaaagg

SEQ ID NO: 17474 - DNA, 21 bp, Homo sapiens
cataacctaasttttgccaaa

SEQ ID NO: 17475 - DNA, 21 bp, Homo sapiens
tttgttaaagragatattttt

SEQ ID NO: 17476 - DNA, 21 bp, Homo sapiens
caggtgaagawgtatgggaga

SEQ ID NO: 17477 - DNA, 21 bp, Homo sapiens
atcgagtcttrgcatatgtgc

SEQ ID NO: 17478 - DNA, 21 bp, Homo sapiens
tctttgttgartatttccaag

SEQ ID NO: 17479 - DNA, 21 bp, Homo sapiens
tgtcagataaytgtttatgaa

SEQ ID NO: 17480 - DNA, 21 bp, Homo sapiens
tcaagggcaaygtcaaagggg

SEQ ID NO: 17481 - DNA, 21 bp, Homo sapiens
acaattatgtraaacaaggaa

SEQ ID NO: 17482 - DNA, 21 bp, Homo sapiens
ccaaattcagygaacagcact

SEQ ID NO: 17483 - DNA, 21 bp, Homo sapiens
gaaatacccaygaaaaaaggg

SEQ ID NO: 17484 - DNA, 21 bp, Homo sapiens
ctgagattcarttgcccacca

SEQ ID NO: 17485 - DNA, 21 bp, Homo sapiens
atttaaatgcsggtatagaac

SEQ ID NO: 17486 - DNA, 21 bp, Homo sapiens
ggggcctcttsagcagttttc

SEQ ID NO: 17487 - DNA, 21 bp, Homo sapiens
tgaatcaagayccctccgtac

SEQ ID NO: 17488 - DNA, 21 bp, Homo sapiens
ctaccctgagrattgctggta

SEQ ID NO: 17489 - DNA, 21 bp, Homo sapiens
gtctggaaaawgccagctctg

SEQ ID NO: 17490 - DNA, 21 bp, Homo sapiens
ctggggagccrgaggccctgc

SEQ ID NO: 17491 - DNA, 21 bp, Homo sapiens
tcatttgttcygcaagcattt

SEQ ID NO: 17492 - DNA, 21 bp, Homo sapiens
tgaggtgggcrgggcagaggg

SEQ ID NO: 17493 - DNA, 21 bp, Homo sapiens
caagtcggttygcgtcctcct

SEQ ID NO: 17494 - DNA, 21 bp, Homo sapiens
ttaagttgccrtcaaatatga

SEQ ID NO: 17495 - DNA, 21 bp, Homo sapiens
tgttctgtatygtatttaaaa

SEQ ID NO: 17496 - DNA, 21 bp, Homo sapiens
atgacataatygcaatcttta

SEQ ID NO: 17497 - DNA, 21 bp, Homo sapiens
gatgagatggytgctaacaga

SEQ ID NO: 17498 - DNA, 21 bp, Homo sapiens
ggggagccctyagtccggctg

SEQ ID NO: 17499 - DNA, 21 bp, Homo sapiens
gctcctcaggyagtgctcaca

SEQ ID NO: 17500 - DNA, 21 bp, Homo sapiens
cttctacagayttccccaatt

SEQ ID NO: 17501 - DNA, 21 bp, Homo sapiens
tcctgacattscagcagatgc

SEQ ID NO: 17502 - DNA, 21 bp, Homo sapiens
ttcttcatcasttcctttctg

SEQ ID NO: 17503 - DNA, 21 bp, Homo sapiens
tgctctcccarcttgcatatt

SEQ ID NO: 17504 - DNA, 21 bp, Homo sapiens
acgtgcacatygtctcaggtc

SEQ ID NO: 17505 - DNA, 21 bp, Homo sapiens
actctgttccstaatataaca

SEQ ID NO: 17506 - DNA, 21 bp, Homo sapiens
tcacaatggcyctgctcactc

SEQ ID NO: 17507 - DNA, 21 bp, Homo sapiens
tttatgggcgkatatacatct

SEQ ID NO: 17508 - DNA, 21 bp, Homo sapiens
ttcagtcacaygtataaggtg

SEQ ID NO: 17509 - DNA, 21 bp, Homo sapiens
cagtctgagcrtgcagtcaat

SEQ ID NO: 17510 - DNA, 21 bp, Homo sapiens
gtcattaaatstagagagttt

SEQ ID NO: 17511 - DNA, 21 bp, Homo sapiens
ctttttaaaawaatgtaacac

SEQ ID NO: 17512 - DNA, 21 bp, Homo sapiens
atatccgtaargttaaaaaaa

SEQ ID NO: 17513 - DNA, 21 bp, Homo sapiens
aattttactgraaagttaatc

SEQ ID NO: 17514 - DNA, 21 bp, Homo sapiens
gtaggctgcakgaatttccgc

SEQ ID NO: 17515 - DNA, 21 bp, Homo sapiens
tctgtggagamccaagatcac

SEQ ID NO: 17516 - DNA, 21 bp, Homo sapiens
tacaggtgacrctgataatac

SEQ ID NO: 17517 - DNA, 21 bp, Homo sapiens
taataaatgcwtgaatttcgg

SEQ ID NO: 17518 - DNA, 21 bp, Homo sapiens
ctctcctaggsagccaggaaa

SEQ ID NO: 17519 - DNA, 21 bp, Homo sapiens
gcgttcctggyagagagtaaa

SEQ ID NO: 17520 - DNA, 21 bp, Homo sapiens
aacaactgccrtcctcatagt

SEQ ID NO: 17521 - DNA, 21 bp, Homo sapiens
agtgacttccyagtagtaaat

SEQ ID NO: 17522 - DNA, 21 bp, Homo sapiens
acttagcctcrtaaaaatcag

SEQ ID NO: 17523 - DNA, 21 bp, Homo sapiens
cagctctcagktaaataaaaa

SEQ ID NO: 17524 - DNA, 21 bp, Homo sapiens
tgtgaggggcrcgcgattttt

SEQ ID NO: 17525 - DNA, 21 bp, Homo sapiens
caggatatacrtttcttcatt

SEQ ID NO: 17526 - DNA, 21 bp, Homo sapiens
tctctgagacwgcctgattcc

SEQ ID NO: 17527 - DNA, 21 bp, Homo sapiens
aaatgacaaaygtagaatatt

SEQ ID NO: 17528 - DNA, 21 bp, Homo sapiens
ttatccttacrtaaagtgccc

SEQ ID NO: 17529 - DNA, 21 bp, Homo sapiens
cagctattgtytgtcctgtga

SEQ ID NO: 17530 - DNA, 21 bp, Homo sapiens
caagcttcatracagcacgca

SEQ ID NO: 17531 - DNA, 21 bp, Homo sapiens
tgccttttccrgaagtaggga

SEQ ID NO: 17532 - DNA, 21 bp, Homo sapiens
tctccaaaagmaggaaaatgt

SEQ ID NO: 17533 - DNA, 21 bp, Homo sapiens
caaccaggccrcagtggagca

SEQ ID NO: 17534 - DNA, 21 bp, Homo sapiens
agctcagggayagagcacttc

SEQ ID NO: 17535 - DNA, 21 bp, Homo sapiens
ctctaatctaraccaccctgc

SEQ ID NO: 17536 - DNA, 21 bp, Homo sapiens
gaagctaacayagtgttcaac

SEQ ID NO: 17537 - DNA, 21 bp, Homo sapiens
acatcaagtcrcttgccaagt

SEQ ID NO: 17538 - DNA, 21 bp, Homo sapiens
aagttacacartgagatatgg

SEQ ID NO: 17539 - DNA, 21 bp, Homo sapiens
agacagaaaaraatttcacat

SEQ ID NO: 17540 - DNA, 21 bp, Homo sapiens
cggtaggtacwaagagggctg

SEQ ID NO: 17541 - DNA, 21 bp, Homo sapiens
tctgtcataakccataatctg

SEQ ID NO: 17542 - DNA, 21 bp, Homo sapiens
cagctgtggarcactccgaga

SEQ ID NO: 17543 - DNA, 21 bp, Homo sapiens
cagtgggcgckttgccctcaa

SEQ ID NO: 17544 - DNA, 21 bp, Homo sapiens
ctcaatttctyctctgaggaa

SEQ ID NO: 17545 - DNA, 21 bp, Homo sapiens
tgggagggatytttctagtta

SEQ ID NO: 17546 - DNA, 21 bp, Homo sapiens
aaaggttgaawgtctgtattc

SEQ ID NO: 17547 - DNA, 21 bp, Homo sapiens
cgaatagtttrttaagcagca

SEQ ID NO: 17548 - DNA, 21 bp, Homo sapiens
ctcagatggcytagtgggtat

SEQ ID NO: 17549 - DNA, 21 bp, Homo sapiens
gggggcatttktctcaagcaa

SEQ ID NO: 17550 - DNA, 21 bp, Homo sapiens
atctctcaagrgaatggcagc

SEQ ID NO: 17551 - DNA, 21 bp, Homo sapiens
gtcgccttccstgtatctccc

SEQ ID NO: 17552 - DNA, 21 bp, Homo sapiens
aagcatgtccrgcatgtctgc

SEQ ID NO: 17553 - DNA, 21 bp, Homo sapiens
ggggtcttcawgagatgtgct

SEQ ID NO: 17554 - DNA, 21 bp, Homo sapiens
caaaaaggaaraatgagtaag

SEQ ID NO: 17555 - DNA, 21 bp, Homo sapiens
cttagtgcctyatgcaaactg

SEQ ID NO: 17556 - DNA, 21 bp, Homo sapiens
ccgatgcaaarcataattggt

SEQ ID NO: 17557 - DNA, 21 bp, Homo sapiens
agttccaaacrtactttcctg

SEQ ID NO: 17558 - DNA, 21 bp, Homo sapiens
tcaaatgaaakgtttcttaga

SEQ ID NO: 17559 - DNA, 21 bp, Homo sapiens
tccaccaaatraaactgtcgt

SEQ ID NO: 17560 - DNA, 21 bp, Homo sapiens
gggttggacargaagattctg

SEQ ID NO: 17561 - DNA, 21 bp, Homo sapiens
gaaacagaatrataatgacca

SEQ ID NO: 17562 - DNA, 21 bp, Homo sapiens
catgtaataarccacaagaaa

SEQ ID NO: 17563 - DNA, 21 bp, Homo sapiens
acaattgggcycctaccctac

SEQ ID NO: 17564 - DNA, 21 bp, Homo sapiens
ttctaaaaccrggggcagagg

SEQ ID NO: 17565 - DNA, 21 bp, Homo sapiens
tatctacattrcaacactgtc

SEQ ID NO: 17566 - DNA, 21 bp, Homo sapiens
tagattttaaragtttgaaat

SEQ ID NO: 17567 - DNA, 21 bp, Homo sapiens
tggcagcactrtcaaatatct

SEQ ID NO: 17568 - DNA, 21 bp, Homo sapiens
ctagatttgtrctgttgaata

SEQ ID NO: 17569 - DNA, 21 bp, Homo sapiens
gaggaaatgtwagttaccatc

SEQ ID NO: 17570 - DNA, 21 bp, Homo sapiens
ccactaaatgytacccagaag

SEQ ID NO: 17571 - DNA, 21 bp, Homo sapiens
ggtgagtaaawttatcaatct

SEQ ID NO: 17572 - DNA, 21 bp, Homo sapiens
ttctccagttycgttctcctg

SEQ ID NO: 17573 - DNA, 21 bp, Homo sapiens
cagtgggaagrtgttgaggag

SEQ ID NO: 17574 - DNA, 21 bp, Homo sapiens
gtattggcctrctgcagacac

SEQ ID NO: 17575 - DNA, 21 bp, Homo sapiens
ggccactgaartacattgagt

SEQ ID NO: 17576 - DNA, 21 bp, Homo sapiens
tatccagattmtctaaccaga

SEQ ID NO: 17577 - DNA, 21 bp, Homo sapiens
cagcaaattgrtatatctgag

SEQ ID NO: 17578 - DNA, 21 bp, Homo sapiens
actgggggacyttaactcatc

SEQ ID NO: 17579 - DNA, 21 bp, Homo sapiens
cacttctgttmtatttcagcc

SEQ ID NO: 17580 - DNA, 21 bp, Homo sapiens
tgaggaaagcraaactgataa

SEQ ID NO: 17581 - DNA, 21 bp, Homo sapiens
tgactgttaamaatcatcatt

SEQ ID NO: 17582 - DNA, 21 bp, Homo sapiens
ccagttcttgraaaatgcatt

SEQ ID NO: 17583 - DNA, 21 bp, Homo sapiens
tgtagaggctrttgtacatac

SEQ ID NO: 17584 - DNA, 21 bp, Homo sapiens
ataaagaatcygaggttttta

SEQ ID NO: 17585 - DNA, 21 bp, Homo sapiens
catgaaagagkgctatggaag

SEQ ID NO: 17586 - DNA, 21 bp, Homo sapiens
taacttggaamgtaaacatca

SEQ ID NO: 17587 - DNA, 21 bp, Homo sapiens
ctggaccagtyaaggtagcag

SEQ ID NO: 17588 - DNA, 21 bp, Homo sapiens
tgatattttayccttattttt

SEQ ID NO: 17589 - DNA, 21 bp, Homo sapiens
acaaatgtcartgccagcttg

SEQ ID NO: 17590 - DNA, 21 bp, Homo sapiens
gtatgctctawattccttcat

SEQ ID NO: 17591 - DNA, 21 bp, Homo sapiens
attccactaasaacattcatc

SEQ ID NO: 17592 - DNA, 21 bp, Homo sapiens
tcaattaaatrttttccttag

SEQ ID NO: 17593 - DNA, 21 bp, Homo sapiens
gaaataatttsataaaggcag

SEQ ID NO: 17594 - DNA, 21 bp, Homo sapiens
gcaaaggggaraacaggcagt

SEQ ID NO: 17595 - DNA, 21 bp, Homo sapiens
tttctccaaaygagaccaaca

SEQ ID NO: 17596 - DNA, 21 bp, Homo sapiens
ataaagcaacragagaggaat

SEQ ID NO: 17597 - DNA, 21 bp, Homo sapiens
gatgagaatgytttgtaagaa

SEQ ID NO: 17598 - DNA, 21 bp, Homo sapiens
tctcggatagmtatttccttt

SEQ ID NO: 17599 - DNA, 21 bp, Homo sapiens
cttcaagtgamtgccaatcaa

SEQ ID NO: 17600 - DNA, 21 bp, Homo sapiens
ctgaaaggctrtaagttttgc

SEQ ID NO: 17601 - DNA, 21 bp, Homo sapiens
agttcatcttktggtataatc

SEQ ID NO: 17602 - DNA, 21 bp, Homo sapiens
gtttgggggawaaattgtcac

SEQ ID NO: 17603 - DNA, 21 bp, Homo sapiens
ggttttcaggrtgctctgaca

SEQ ID NO: 17604 - DNA, 21 bp, Homo sapiens
aaacatttctrtccctggttt

SEQ ID NO: 17605 - DNA, 21 bp, Homo sapiens
catatgctttygcttttcctt

SEQ ID NO: 17606 - DNA, 21 bp, Homo sapiens
atactattctmagactccttg

SEQ ID NO: 17607 - DNA, 21 bp, Homo sapiens
ataatgtatayccatggcttt

SEQ ID NO: 17608 - DNA, 21 bp, Homo sapiens
tttgccaacargacaatcttc

SEQ ID NO: 17609 - DNA, 21 bp, Homo sapiens
ttaagatagawtgctgttagg

SEQ ID NO: 17610 - DNA, 21 bp, Homo sapiens
aattgagaggrgtagttgcaa

SEQ ID NO: 17611 - DNA, 21 bp, Homo sapiens
ggagaagaagytagttttgca

SEQ ID NO: 17612 - DNA, 21 bp, Homo sapiens
atactgtaacyacttgtaggt

SEQ ID NO: 17613 - DNA, 21 bp, Homo sapiens
catccggaaayttgaaaccag

SEQ ID NO: 17614 - DNA, 21 bp, Homo sapiens
atataggtcartgcaactttc

SEQ ID NO: 17615 - DNA, 21 bp, Homo sapiens
ttattttactyttgtaaacaa

SEQ ID NO: 17616 - DNA, 21 bp, Homo sapiens
tcagcaaaatrcagccaatgg

SEQ ID NO: 17617 - DNA, 21 bp, Homo sapiens
actacaaatakgcatactttg

SEQ ID NO: 17618 - DNA, 21 bp, Homo sapiens
cttaagttacmcaaagcattc

SEQ ID NO: 17619 - DNA, 21 bp, Homo sapiens
agtgtgtgttkcttccctgct

SEQ ID NO: 17620 - DNA, 21 bp, Homo sapiens
ttcagctctcrgtcttactaa

SEQ ID NO: 17621 - DNA, 21 bp, Homo sapiens
tggagaaagayactcaataaa

SEQ ID NO: 17622 - DNA, 21 bp, Homo sapiens
catcaacaacktggagtttgg

SEQ ID NO: 17623 - DNA, 21 bp, Homo sapiens
accaaccaagygcagggagga

SEQ ID NO: 17624 - DNA, 21 bp, Homo sapiens
tgttttgtacyccagctacag

SEQ ID NO: 17625 - DNA, 21 bp, Homo sapiens
aaaataattamagtttttgac

SEQ ID NO: 17626 - DNA, 21 bp, Homo sapiens
tagaaacaggygaagcaacaa

SEQ ID NO: 17627 - DNA, 21 bp, Homo sapiens
gccagccactrgaccaaccag

SEQ ID NO: 17628 - DNA, 21 bp, Homo sapiens
aaggagggcaytactggccac

SEQ ID NO: 17629 - DNA, 21 bp, Homo sapiens
cggaggagccsgtgacaaagc

SEQ ID NO: 17630 - DNA, 21 bp, Homo sapiens
acaaaaatatratgaaggcag

SEQ ID NO: 17631 - DNA, 21 bp, Homo sapiens
ctcctccaccsttccgcccct

SEQ ID NO: 17632 - DNA, 21 bp, Homo sapiens
aatatggaccygtatgtatct

SEQ ID NO: 17633 - DNA, 21 bp, Homo sapiens
tgttttattcmatatgaacta

SEQ ID NO: 17634 - DNA, 21 bp, Homo sapiens
actcaacattrtagtggactt

SEQ ID NO: 17635 - DNA, 21 bp, Homo sapiens
cgtttgctgaygaaggctctg

SEQ ID NO: 17636 - DNA, 21 bp, Homo sapiens
aatggaagacrctgtctaagg

SEQ ID NO: 17637 - DNA, 21 bp, Homo sapiens
ttgggcggccrggtaaaggag

SEQ ID NO: 17638 - DNA, 21 bp, Homo sapiens
acaatactgtratcagcaaga

SEQ ID NO: 17639 - DNA, 21 bp, Homo sapiens
ttcatccaacstctttccata

SEQ ID NO: 17640 - DNA, 21 bp, Homo sapiens
ttggccgattytttattgtgg

SEQ ID NO: 17641 - DNA, 21 bp, Homo sapiens
tgttaacttargctttgaaag

SEQ ID NO: 17642 - DNA, 21 bp, Homo sapiens
taactaaaackttagaaattt

SEQ ID NO: 17643 - DNA, 21 bp, Homo sapiens
atcaagcaaaracagaccatc

SEQ ID NO: 17644 - DNA, 21 bp, Homo sapiens
ataggtatctyaccaaccaat

SEQ ID NO: 17645 - DNA, 21 bp, Homo sapiens
ttcaatttcartcatctgtac

SEQ ID NO: 17646 - DNA, 21 bp, Homo sapiens
aaagacagtgygtttaaagat

SEQ ID NO: 17647 - DNA, 21 bp, Homo sapiens
gtgttaaaagwtacaccatat

SEQ ID NO: 17648 - DNA, 21 bp, Homo sapiens
cattaattctsagatcacatc

SEQ ID NO: 17649 - DNA, 21 bp, Homo sapiens
ctgtattcttyataatttgat

SEQ ID NO: 17650 - DNA, 21 bp, Homo sapiens
tgtttcaggtkgaatttttat

SEQ ID NO: 17651 - DNA, 21 bp, Homo sapiens
ctggcttattmttaagtatat

SEQ ID NO: 17652 - DNA, 21 bp, Homo sapiens
taaatcatcartttaacattt

SEQ ID NO: 17653 - DNA, 21 bp, Homo sapiens
ttccatacttygtattggtgt

SEQ ID NO: 17654 - DNA, 21 bp, Homo sapiens
catgaaattayagtaaatttt

SEQ ID NO: 17655 - DNA, 21 bp, Homo sapiens
acacttagaaytctatcccta

SEQ ID NO: 17656 - DNA, 21 bp, Homo sapiens
aaccaccttcrtaaagctaat

SEQ ID NO: 17657 - DNA, 21 bp, Homo sapiens
aagtaggtacytaataaatat

SEQ ID NO: 17658 - DNA, 21 bp, Homo sapiens
ttcatttgaargcttcttctt

SEQ ID NO: 17659 - DNA, 21 bp, Homo sapiens
tatggaatatrtatatgtgtg

SEQ ID NO: 17660 - DNA, 21 bp, Homo sapiens
attggcttttwcttatcaata

SEQ ID NO: 17661 - DNA, 21 bp, Homo sapiens
ctctagtctgmagatgtagaa

SEQ ID NO: 17662 - DNA, 21 bp, Homo sapiens
cagagagaaayagtacccctc

SEQ ID NO: 17663 - DNA, 21 bp, Homo sapiens
gatgcccaagkgaggaagtct

SEQ ID NO: 17664 - DNA, 21 bp, Homo sapiens
tcctcgctccrtgtccctgct

SEQ ID NO: 17665 - DNA, 21 bp, Homo sapiens
gctctgggaargtgcatgtag

SEQ ID NO: 17666 - DNA, 21 bp, Homo sapiens
gcccatctgayagcgcctgcc

SEQ ID NO: 17667 - DNA, 21 bp, Homo sapiens
ccgtaaaaggwctataatgtc

SEQ ID NO: 17668 - DNA, 21 bp, Homo sapiens
aatctgtgtayggcaatgacg

SEQ ID NO: 17669 - DNA, 21 bp, Homo sapiens
tttagtttgartatcagactt

SEQ ID NO: 17670 - DNA, 21 bp, Homo sapiens
atgttaagtaygttgagatat

SEQ ID NO: 17671 - DNA, 21 bp, Homo sapiens
ggctttatagrttatattgaa

SEQ ID NO: 17672 - DNA, 21 bp, Homo sapiens
aaatatttatyatatgacctg

SEQ ID NO: 17673 - DNA, 21 bp, Homo sapiens
tattttatttktcctttaacc

SEQ ID NO: 17674 - DNA, 21 bp, Homo sapiens
accatttctgytattagttgt

SEQ ID NO: 17675 - DNA, 21 bp, Homo sapiens
aaagtacatgmgaaagataga

SEQ ID NO: 17676 - DNA, 21 bp, Homo sapiens
aagagctttawgtggccgggc

SEQ ID NO: 17677 - DNA, 21 bp, Homo sapiens
gatttatatgrtactaaagat

SEQ ID NO: 17678 - DNA, 21 bp, Homo sapiens
agaaaggtccmgttgtagata

SEQ ID NO: 17679 - DNA, 21 bp, Homo sapiens
agtcatccctsggtatcccct

SEQ ID NO: 17680 - DNA, 21 bp, Homo sapiens
caaaattaaamatttaaaaat

SEQ ID NO: 17681 - DNA, 21 bp, Homo sapiens
gaacattctargtaaaatgct

SEQ ID NO: 17682 - DNA, 21 bp, Homo sapiens
ctctgttccargtaatcaata

SEQ ID NO: 17683 - DNA, 21 bp, Homo sapiens
tcatccttccrcaatcaggaa

SEQ ID NO: 17684 - DNA, 21 bp, Homo sapiens
ggacaaagatratattcactt

SEQ ID NO: 17685 - DNA, 21 bp, Homo sapiens
ctcatttgtcrttaaggaatt

SEQ ID NO: 17686 - DNA, 21 bp, Homo sapiens
acgctttctayacagcatgta

SEQ ID NO: 17687 - DNA, 21 bp, Homo sapiens
accaccacagktcccccacat

SEQ ID NO: 17688 - DNA, 21 bp, Homo sapiens
agaccactgcsctatacaatt

SEQ ID NO: 17689 - DNA, 21 bp, Homo sapiens
tataatatccrgagtaagtac

SEQ ID NO: 17690 - DNA, 21 bp, Homo sapiens
gattttatttwtttttttttt

SEQ ID NO: 17691 - DNA, 21 bp, Homo sapiens
caaatattgawgcccttatga

SEQ ID NO: 17692 - DNA, 21 bp, Homo sapiens
ttaaaatattwctttcttcag

SEQ ID NO: 17693 - DNA, 21 bp, Homo sapiens
ttagttttatwaaaagcaata

SEQ ID NO: 17694 - DNA, 21 bp, Homo sapiens
tttctaagacytcctctacat

SEQ ID NO: 17695 - DNA, 21 bp, Homo sapiens
ttagatcaacragtggcaatc

SEQ ID NO: 17696 - DNA, 21 bp, Homo sapiens
gtgacttaggrtttgcaagat

SEQ ID NO: 17697 - DNA, 21 bp, Homo sapiens
tcaaacacaarggaattactg

SEQ ID NO: 17698 - DNA, 21 bp, Homo sapiens
gtcatatccaycccggtcagg

SEQ ID NO: 17699 - DNA, 21 bp, Homo sapiens
gcacatggatrgttttgacca

SEQ ID NO: 17700 - DNA, 21 bp, Homo sapiens
atatgttattstaggtcattg

SEQ ID NO: 17701 - DNA, 21 bp, Homo sapiens
aattttttccrtcagcagact

SEQ ID NO: 17702 - DNA, 21 bp, Homo sapiens
ccgtccttgtmatttgatcaa

SEQ ID NO: 17703 - DNA, 21 bp, Homo sapiens
catgccacagrgtgactggga

SEQ ID NO: 17704 - DNA, 21 bp, Homo sapiens
atagtttccastctcgagcac

SEQ ID NO: 17705 - DNA, 21 bp, Homo sapiens
cttccctaatmtatctgttca

SEQ ID NO: 17706 - DNA, 21 bp, Homo sapiens
aaaaactcagrtagtttaccc

SEQ ID NO: 17707 - DNA, 21 bp, Homo sapiens
ccaatgaattytaaatgttta

SEQ ID NO: 17708 - DNA, 21 bp, Homo sapiens
gggtcagttgrctttgtttca

SEQ ID NO: 17709 - DNA, 21 bp, Homo sapiens
gtccctgctakatcctccagc

SEQ ID NO: 17710 - DNA, 21 bp, Homo sapiens
caaggagaagwttagccccat

SEQ ID NO: 17711 - DNA, 21 bp, Homo sapiens
agatggaagcrattggtatag

SEQ ID NO: 17712 - DNA, 21 bp, Homo sapiens
tgttcatgagyggcaggtgca

SEQ ID NO: 17713 - DNA, 21 bp, Homo sapiens
atgattgaacygagttttgtg

SEQ ID NO: 17714 - DNA, 21 bp, Homo sapiens
tgggtgctcgsgagtagcctt

SEQ ID NO: 17715 - DNA, 21 bp, Homo sapiens
gcaagaatgargtaactccca

SEQ ID NO: 17716 - DNA, 21 bp, Homo sapiens
gagtactatgwgctgagccag

SEQ ID NO: 17717 - DNA, 21 bp, Homo sapiens
ctgggcacggratgtaccttg

SEQ ID NO: 17718 - DNA, 21 bp, Homo sapiens
tgctcctggayaatgggattc

SEQ ID NO: 17719 - DNA, 21 bp, Homo sapiens
attgctgttgrggtttttgtg

SEQ ID NO: 17720 - DNA, 21 bp, Homo sapiens
tatgtccattygcattttaaa

SEQ ID NO: 17721 - DNA, 21 bp, Homo sapiens
ttgtgggtttytctagactcc

SEQ ID NO: 17722 - DNA, 21 bp, Homo sapiens
cacaatgcctrtgggaacccc

SEQ ID NO: 17723 - DNA, 21 bp, Homo sapiens
agagcaaaccrtacttcttaa

SEQ ID NO: 17724 - DNA, 21 bp, Homo sapiens
agctttgaatmtcttcctggg

SEQ ID NO: 17725 - DNA, 21 bp, Homo sapiens
ggggcttaackcctatagcac

SEQ ID NO: 17726 - DNA, 21 bp, Homo sapiens
cttttggctcrttcttttcat

SEQ ID NO: 17727 - DNA, 21 bp, Homo sapiens
taggtccaccmgtgtgagctg

SEQ ID NO: 17728 - DNA, 21 bp, Homo sapiens
accacttcctmggagcagaat

SEQ ID NO: 17729 - DNA, 21 bp, Homo sapiens
aatgtatatgygtgcaatttt

SEQ ID NO: 17730 - DNA, 21 bp, Homo sapiens
ttttagtttgstggtggaagg

SEQ ID NO: 17731 - DNA, 21 bp, Homo sapiens
ttttggctacwtaattttctt

SEQ ID NO: 17732 - DNA, 21 bp, Homo sapiens
tctgctcaggktgtcactgtg

SEQ ID NO: 17733 - DNA, 21 bp, Homo sapiens
ctgagaacccrgaatctcagt

SEQ ID NO: 17734 - DNA, 21 bp, Homo sapiens
gtgattaaagyactacgtttg

SEQ ID NO: 17735 - DNA, 21 bp, Homo sapiens
gattttctttygccttcaggg

SEQ ID NO: 17736 - DNA, 21 bp, Homo sapiens
ttgggaacatyagaaaaactg

SEQ ID NO: 17737 - DNA, 21 bp, Homo sapiens
gagagttataygagtctgaga

SEQ ID NO: 17738 - DNA, 21 bp, Homo sapiens
ggctcagaackgtagctatct

SEQ ID NO: 17739 - DNA, 21 bp, Homo sapiens
aggtttatgaraaattctaaa

SEQ ID NO: 17740 - DNA, 21 bp, Homo sapiens
tttagatagcragaatcatgc

SEQ ID NO: 17741 - DNA, 21 bp, Homo sapiens
tgtgtctctgkggctaaatat

SEQ ID NO: 17742 - DNA, 21 bp, Homo sapiens
agtggccccaragaagcaggg

SEQ ID NO: 17743 - DNA, 21 bp, Homo sapiens
ttgatgtcccracagatttag

SEQ ID NO: 17744 - DNA, 21 bp, Homo sapiens
caggtattgcmatgctctttg

SEQ ID NO: 17745 - DNA, 21 bp, Homo sapiens
cccctcagtakgtcacacaca

SEQ ID NO: 17746 - DNA, 21 bp, Homo sapiens
gatggtcctgyccaaagagtc

SEQ ID NO: 17747 - DNA, 21 bp, Homo sapiens
ttgaactttcmagaaatggtt

SEQ ID NO: 17748 - DNA, 21 bp, Homo sapiens
tttagctcctytcagagatgc

SEQ ID NO: 17749 - DNA, 21 bp, Homo sapiens
gtgcatctagygggcaattgg

SEQ ID NO: 17750 - DNA, 21 bp, Homo sapiens
aggccacgctmttcctgggta

SEQ ID NO: 17751 - DNA, 21 bp, Homo sapiens
gaaatgaaacractgagctca

SEQ ID NO: 17752 - DNA, 21 bp, Homo sapiens
taactgaaaamaagcaattgt

SEQ ID NO: 17753 - DNA, 21 bp, Homo sapiens
cacatttgcaraaacatcaca

SEQ ID NO: 17754 - DNA, 21 bp, Homo sapiens
cactttgttgmgctttaggag

SEQ ID NO: 17755 - DNA, 21 bp, Homo sapiens
ctatctttcaytgatgtttat

SEQ ID NO: 17756 - DNA, 21 bp, Homo sapiens
agccatatctrtcttcattgc

SEQ ID NO: 17757 - DNA, 21 bp, Homo sapiens
gagcaatggtyatgatgttag

SEQ ID NO: 17758 - DNA, 21 bp, Homo sapiens
aataaagcatrtacaattcag

SEQ ID NO: 17759 - DNA, 21 bp, Homo sapiens
cttgatttccycagaaatgtt

SEQ ID NO: 17760 - DNA, 21 bp, Homo sapiens
gacaggctgartaactcaaga

SEQ ID NO: 17761 - DNA, 21 bp, Homo sapiens
atggtaccccrccatctgctc

SEQ ID NO: 17762 - DNA, 21 bp, Homo sapiens
cttttcatcawcttaatgact

SEQ ID NO: 17763 - DNA, 21 bp, Homo sapiens
tgctgacattyctgcttgaat

SEQ ID NO: 17764 - DNA, 21 bp, Homo sapiens
gaggtttgaawacactggtag

SEQ ID NO: 17765 - DNA, 21 bp, Homo sapiens
tcaagctggcmacaggaacta

SEQ ID NO: 17766 - DNA, 21 bp, Homo sapiens
ttttgaatgtrgagaaatcat

SEQ ID NO: 17767 - DNA, 21 bp, Homo sapiens
gttttacacartgtcatgtgt

SEQ ID NO: 17768 - DNA, 21 bp, Homo sapiens
ctgatccctawacagcttcaa

SEQ ID NO: 17769 - DNA, 21 bp, Homo sapiens
cttaatatttwaaatccaaac

SEQ ID NO: 17770 - DNA, 21 bp, Homo sapiens
gtctgctgaayctaaagaata

SEQ ID NO: 17771 - DNA, 21 bp, Homo sapiens
ataaattgtcrttttgttgat

SEQ ID NO: 17772 - DNA, 21 bp, Homo sapiens
tttacttcagrctggagaaag

SEQ ID NO: 17773 - DNA, 21 bp, Homo sapiens
atgtctaatayccttgcttta

SEQ ID NO: 17774 - DNA, 21 bp, Homo sapiens
ttgtcagaaamactcttctcc

SEQ ID NO: 17775 - DNA, 21 bp, Homo sapiens
gtgttgaaaamattttaaatt

SEQ ID NO: 17776 - DNA, 21 bp, Homo sapiens
aagacagaatrttgtggtacc

SEQ ID NO: 17777 - DNA, 21 bp, Homo sapiens
agttgacaacrctggctacag

SEQ ID NO: 17778 - DNA, 21 bp, Homo sapiens
taattattaasagccaggaat

SEQ ID NO: 17779 - DNA, 21 bp, Homo sapiens
ttaccttaacrtttccataaa

SEQ ID NO: 17780 - DNA, 21 bp, Homo sapiens
tttagtacttygcttatatat

SEQ ID NO: 17781 - DNA, 21 bp, Homo sapiens
attacgattcrcaagacatgt

SEQ ID NO: 17782 - DNA, 21 bp, Homo sapiens
ctacaaagaaytgatgtgata

SEQ ID NO: 17783 - DNA, 21 bp, Homo sapiens
agttgccgatrttccagaggg

SEQ ID NO: 17784 - DNA, 21 bp, Homo sapiens
tattcctacaygatattttca

SEQ ID NO: 17785 - DNA, 21 bp, Homo sapiens
gtatattattyattggaagtt

SEQ ID NO: 17786 - DNA, 21 bp, Homo sapiens
taattgctgcmctaatacatt

SEQ ID NO: 17787 - DNA, 21 bp, Homo sapiens
tctttcttccrtgtcctcata

SEQ ID NO: 17788 - DNA, 21 bp, Homo sapiens
aaattgtagamcaagagctaa

SEQ ID NO: 17789 - DNA, 21 bp, Homo sapiens
gaaatacactratcagtcatt

SEQ ID NO: 17790 - DNA, 21 bp, Homo sapiens
ctgtcgttgtwtttccttaaa

SEQ ID NO: 17791 - DNA, 21 bp, Homo sapiens
tcaacataatmttcagcaaac

SEQ ID NO: 17792 - DNA, 21 bp, Homo sapiens
cggaaagtgamgattttaaat

SEQ ID NO: 17793 - DNA, 21 bp, Homo sapiens
aaatatctttratgttttgcg

SEQ ID NO: 17794 - DNA, 21 bp, Homo sapiens
caagatatctkgctacagtta

SEQ ID NO: 17795 - DNA, 21 bp, Homo sapiens
cttacccactyggtggcttgg

SEQ ID NO: 17796 - DNA, 21 bp, Homo sapiens
tgataaatagkacatgttttg

SEQ ID NO: 17797 - DNA, 21 bp, Homo sapiens
ttttattccaytgtaaaacac

SEQ ID NO: 17798 - DNA, 21 bp, Homo sapiens
gagagtaggcrtaggtaatac

SEQ ID NO: 17799 - DNA, 21 bp, Homo sapiens
tatcagaattyacctacaatt

SEQ ID NO: 17800 - DNA, 21 bp, Homo sapiens
ttaaaatgtcrgaattgaata

SEQ ID NO: 17801 - DNA, 21 bp, Homo sapiens
ttctgggtgtyaagactgacg

SEQ ID NO: 17802 - DNA, 21 bp, Homo sapiens
tcaacaaaagmcttgctcaag

SEQ ID NO: 17803 - DNA, 21 bp, Homo sapiens
ttaatcaaggwtgtcttactt

SEQ ID NO: 17804 - DNA, 21 bp, Homo sapiens
aatatagcaaycactaaaacc

SEQ ID NO: 17805 - DNA, 21 bp, Homo sapiens
tcaaatgtgayattatttgaa

SEQ ID NO: 17806 - DNA, 21 bp, Homo sapiens
ttatgaacaasacacctagaa

SEQ ID NO: 17807 - DNA, 21 bp, Homo sapiens
attacagaaamatgacttttt

SEQ ID NO: 17808 - DNA, 21 bp, Homo sapiens
tgattataatmgatgtctact

SEQ ID NO: 17809 - DNA, 21 bp, Homo sapiens
ggtttaaaagmtgaaaactac

SEQ ID NO: 17810 - DNA, 21 bp, Homo sapiens
gacaagtcatraagttcttga

SEQ ID NO: 17811 - DNA, 21 bp, Homo sapiens
cgtggagtgcygaatttttga

SEQ ID NO: 17812 - DNA, 21 bp, Homo sapiens
tttctctatartgcaagattt

SEQ ID NO: 17813 - DNA, 21 bp, Homo sapiens
ttcatatacayttcctaggat

SEQ ID NO: 17814 - DNA, 21 bp, Homo sapiens
acctgtgtttrttttgtgata

SEQ ID NO: 17815 - DNA, 21 bp, Homo sapiens
ccagtatttaragccatttta

SEQ ID NO: 17816 - DNA, 21 bp, Homo sapiens
aagggcaaaaytaatgatgag

SEQ ID NO: 17817 - DNA, 21 bp, Homo sapiens
ataagccaackgtaagcatgt

SEQ ID NO: 17818 - DNA, 21 bp, Homo sapiens
gttactgccarattttatggg

SEQ ID NO: 17819 - DNA, 21 bp, Homo sapiens
cagttcagaawggcggatcac

SEQ ID NO: 17820 - DNA, 21 bp, Homo sapiens
tctcttttcawtgctttaggg

SEQ ID NO: 17821 - DNA, 21 bp, Homo sapiens
gcaaagctccrtgtcaactca

SEQ ID NO: 17822 - DNA, 21 bp, Homo sapiens
gtgataaaacygcggattctg

SEQ ID NO: 17823 - DNA, 21 bp, Homo sapiens
cactgataaayagactcacct

SEQ ID NO: 17824 - DNA, 21 bp, Homo sapiens
aacatttagtktgtagatgca

SEQ ID NO: 17825 - DNA, 21 bp, Homo sapiens
tggatgagtaygaggagggcg

SEQ ID NO: 17826 - DNA, 21 bp, Homo sapiens
cacgggcaatrtcagagcagg

SEQ ID NO: 17827 - DNA, 21 bp, Homo sapiens
ccaaaaacacmtgggacggag

SEQ ID NO: 17828 - DNA, 21 bp, Homo sapiens
acggatgaacrgtgcaagtgt

SEQ ID NO: 17829 - DNA, 21 bp, Homo sapiens
aatagccatcyatccgtctaa

SEQ ID NO: 17830 - DNA, 21 bp, Homo sapiens
ggcgctctcgrtcagccagtg

SEQ ID NO: 17831 - DNA, 21 bp, Homo sapiens
agaacaatgastgtgccctta

SEQ ID NO: 17832 - DNA, 21 bp, Homo sapiens
atgatatctargcaaatattt

SEQ ID NO: 17833 - DNA, 21 bp, Homo sapiens
tttcttgtttygaataatgag

SEQ ID NO: 17834 - DNA, 21 bp, Homo sapiens
cttgaggtctytgaatcagca

SEQ ID NO: 17835 - DNA, 21 bp, Homo sapiens
ttatggaaatsaagattcaac

SEQ ID NO: 17836 - DNA, 21 bp, Homo sapiens
ttgaaattttracatttgaac

SEQ ID NO: 17837 - DNA, 21 bp, Homo sapiens
ctttctgatgytgagttctgt

SEQ ID NO: 17838 - DNA, 21 bp, Homo sapiens
atgatccctcrttttaatagc

SEQ ID NO: 17839 - DNA, 21 bp, Homo sapiens
ctttggaaccyttcaattttt

SEQ ID NO: 17840 - DNA, 21 bp, Homo sapiens
cactagaagcygaactgacag

SEQ ID NO: 17841 - DNA, 21 bp, Homo sapiens
agcatatgcayggggtatcag

SEQ ID NO: 17842 - DNA, 21 bp, Homo sapiens
tatcagcatawgattattatc

SEQ ID NO: 17843 - DNA, 21 bp, Homo sapiens
cttgttcccayagggtcaagg

SEQ ID NO: 17844 - DNA, 21 bp, Homo sapiens
gaagcacgagyacacacccac

SEQ ID NO: 17845 - DNA, 21 bp, Homo sapiens
catcatcccayaggcagacag

SEQ ID NO: 17846 - DNA, 21 bp, Homo sapiens
agtggccaggkttgtgcaatg

SEQ ID NO: 17847 - DNA, 21 bp, Homo sapiens
gagattaaccraagtggcgcc

SEQ ID NO: 17848 - DNA, 21 bp, Homo sapiens
tgatgaatcaygtgtaccggg

SEQ ID NO: 17849 - DNA, 21 bp, Homo sapiens
gtttcctccaygggcctgggt

SEQ ID NO: 17850 - DNA, 21 bp, Homo sapiens
gagggggacawgggtggtaac

SEQ ID NO: 17851 - DNA, 21 bp, Homo sapiens
ttcttggtttscttcccaggc

SEQ ID NO: 17852 - DNA, 21 bp, Homo sapiens
aggagaaaaaycaagccagat

SEQ ID NO: 17853 - DNA, 21 bp, Homo sapiens
tgcagaaagcragacccaaac

SEQ ID NO: 17854 - DNA, 21 bp, Homo sapiens
ctcccagaacyactggaagaa

SEQ ID NO: 17855 - DNA, 21 bp, Homo sapiens
gcacatactgkaagggcctaa

SEQ ID NO: 17856 - DNA, 21 bp, Homo sapiens
tataaacagarctgtttgctg

SEQ ID NO: 17857 - DNA, 21 bp, Homo sapiens
tcagaagacarggctgttccc

SEQ ID NO: 17858 - DNA, 21 bp, Homo sapiens
gggtgtagcaratctgttgca

SEQ ID NO: 17859 - DNA, 21 bp, Homo sapiens
gcatagaaacrgaaaccaaag

SEQ ID NO: 17860 - DNA, 21 bp, Homo sapiens
aaaaggctgasacttgggtaa

SEQ ID NO: 17861 - DNA, 21 bp, Homo sapiens
cgtgaatgtcrggaatatgga

SEQ ID NO: 17862 - DNA, 21 bp, Homo sapiens
atagactacargacaggaagc

SEQ ID NO: 17863 - DNA, 21 bp, Homo sapiens
cttcagataawggtgcggtca

SEQ ID NO: 17864 - DNA, 21 bp, Homo sapiens
caataaaatgygtctcttttt

SEQ ID NO: 17865 - DNA, 21 bp, Homo sapiens
agtggaaagtygctgttcaat

SEQ ID NO: 17866 - DNA, 21 bp, Homo sapiens
ctctgaaaatrgggttaacaa

SEQ ID NO: 17867 - DNA, 21 bp, Homo sapiens
ttttaggcacygtgctgaggg

SEQ ID NO: 17868 - DNA, 21 bp, Homo sapiens
caaaacactgygatgaactag

SEQ ID NO: 17869 - DNA, 21 bp, Homo sapiens
acgtattgagytacaacacgg

SEQ ID NO: 17870 - DNA, 21 bp, Homo sapiens
tcatgctcttygaagccacac

SEQ ID NO: 17871 - DNA, 21 bp, Homo sapiens
ttctcagcatyagacacagta

SEQ ID NO: 17872 - DNA, 21 bp, Homo sapiens
agttcggtaaraatcaaaaat

SEQ ID NO: 17873 - DNA, 21 bp, Homo sapiens
cttgaggaggrcacgggactt

SEQ ID NO: 17874 - DNA, 21 bp, Homo sapiens
ccatggattaygagattagtt

SEQ ID NO: 17875 - DNA, 21 bp, Homo sapiens
ttataatgatktttaagctag

SEQ ID NO: 17876 - DNA, 21 bp, Homo sapiens
tgctgcattayaaaccccaaa

SEQ ID NO: 17877 - DNA, 21 bp, Homo sapiens
acgcctgtgaygccaggatgc

SEQ ID NO: 17878 - DNA, 21 bp, Homo sapiens
tccatttcctyatctgaaaag

SEQ ID NO: 17879 - DNA, 21 bp, Homo sapiens
ttctaccagaygtggacccca

SEQ ID NO: 17880 - DNA, 21 bp, Homo sapiens
agtaataacayatatacgctc

SEQ ID NO: 17881 - DNA, 21 bp, Homo sapiens
ggagagcccaytataaaacag

SEQ ID NO: 17882 - DNA, 21 bp, Homo sapiens
aaggtaatttwaaaaagattt

SEQ ID NO: 17883 - DNA, 21 bp, Homo sapiens
aaacttgactygtacccgttg

SEQ ID NO: 17884 - DNA, 21 bp, Homo sapiens
gtaaaaagcasaaatagcttt

SEQ ID NO: 17885 - DNA, 21 bp, Homo sapiens
tatggcagaayttgacattat

SEQ ID NO: 17886 - DNA, 21 bp, Homo sapiens
tcaagtatcamttctcactga

SEQ ID NO: 17887 - DNA, 21 bp, Homo sapiens
tcttaatactygttaaaggga

SEQ ID NO: 17888 - DNA, 21 bp, Homo sapiens
accatgttctygtaatccctt

SEQ ID NO: 17889 - DNA, 21 bp, Homo sapiens
ttcagccactktcaatacttc

SEQ ID NO: 17890 - DNA, 21 bp, Homo sapiens
cagaagctccrccaatggcaa

SEQ ID NO: 17891 - DNA, 21 bp, Homo sapiens
ggcttacctgsttaggcacct

SEQ ID NO: 17892 - DNA, 21 bp, Homo sapiens
tcttgcttaargatgttctgt

SEQ ID NO: 17893 - DNA, 21 bp, Homo sapiens
tggcatcatcrgtgaaggccc

SEQ ID NO: 17894 - DNA, 21 bp, Homo sapiens
tttaacattgrcatcaaaatc

SEQ ID NO: 17895 - DNA, 21 bp, Homo sapiens
tctttcttacrgtcaagtagg

SEQ ID NO: 17896 - DNA, 21 bp, Homo sapiens
tgtggcagaawaaacagcagt

SEQ ID NO: 17897 - DNA, 21 bp, Homo sapiens
caaggaagaamtctctgaata

SEQ ID NO: 17898 - DNA, 21 bp, Homo sapiens
attctgtaccsttcatgatct

SEQ ID NO: 17899 - DNA, 21 bp, Homo sapiens
ctatgtcaagyaatggaggtt

SEQ ID NO: 17900 - DNA, 21 bp, Homo sapiens
ctctcatagtrtatctgtaaa

SEQ ID NO: 17901 - DNA, 21 bp, Homo sapiens
gaaaaaaaaaratgcaggtta

SEQ ID NO: 17902 - DNA, 21 bp, Homo sapiens
tatgcaatacrccttcttaca

SEQ ID NO: 17903 - DNA, 21 bp, Homo sapiens
attattgctgrtattattgct

SEQ ID NO: 17904 - DNA, 21 bp, Homo sapiens
gttgagaaacygcattgcgtt

SEQ ID NO: 17905 - DNA, 21 bp, Homo sapiens
tttattataartgacaagaca

SEQ ID NO: 17906 - DNA, 21 bp, Homo sapiens
aaatacggtcytttatcttaa

SEQ ID NO: 17907 - DNA, 21 bp, Homo sapiens
cagagaacacycactaaggcc

SEQ ID NO: 17908 - DNA, 21 bp, Homo sapiens
ttgaatgcatyttatagaatc

SEQ ID NO: 17909 - DNA, 21 bp, Homo sapiens
tggccctcttwcctacttttt

SEQ ID NO: 17910 - DNA, 21 bp, Homo sapiens
ctatgtagtgyagcttctgtg

SEQ ID NO: 17911 - DNA, 21 bp, Homo sapiens
ccttcccacawcctagagaaa

SEQ ID NO: 17912 - DNA, 21 bp, Homo sapiens
gtgagacaatrtagcccagtg

SEQ ID NO: 17913 - DNA, 21 bp, Homo sapiens
accaatagaaygtctttgagc

SEQ ID NO: 17914 - DNA, 21 bp, Homo sapiens
tgtaatttatrgatactttct

SEQ ID NO: 17915 - DNA, 21 bp, Homo sapiens
gaacttcagtrtttatgaaac

SEQ ID NO: 17916 - DNA, 21 bp, Homo sapiens
tgaaagaagcrataggtgaag

SEQ ID NO: 17917 - DNA, 21 bp, Homo sapiens
aagcagttacstgtgtctatg

SEQ ID NO: 17918 - DNA, 21 bp, Homo sapiens
tttcaggcatyctcaaaaggg

SEQ ID NO: 17919 - DNA, 21 bp, Homo sapiens
agcattggaarcgacacagtg

SEQ ID NO: 17920 - DNA, 21 bp, Homo sapiens
ttaagggtctrttccctggag

SEQ ID NO: 17921 - DNA, 21 bp, Homo sapiens
gatttgtgtaktttttcttca

SEQ ID NO: 17922 - DNA, 21 bp, Homo sapiens
ctaactcaatrttggtcatgt

SEQ ID NO: 17923 - DNA, 21 bp, Homo sapiens
gaacctacagyttatttatga

SEQ ID NO: 17924 - DNA, 21 bp, Homo sapiens
agatgaaagaytggacaaagt

SEQ ID NO: 17925 - DNA, 21 bp, Homo sapiens
ttccatgggcrctgaaaatgg

SEQ ID NO: 17926 - DNA, 21 bp, Homo sapiens
tatctatgcargcatggggca

SEQ ID NO: 17927 - DNA, 21 bp, Homo sapiens
tgttcaggcakttagattatc

SEQ ID NO: 17928 - DNA, 21 bp, Homo sapiens
taaaatctctrtattaactgg

SEQ ID NO: 17929 - DNA, 21 bp, Homo sapiens
ctctgcttagrtgcttggaat

SEQ ID NO: 17930 - DNA, 21 bp, Homo sapiens
tgccttatttwtagggacttt

SEQ ID NO: 17931 - DNA, 21 bp, Homo sapiens
tcagtcttgtyaacattttta

SEQ ID NO: 17932 - DNA, 21 bp, Homo sapiens
gttttcaaagkcaaatatggg

SEQ ID NO: 17933 - DNA, 21 bp, Homo sapiens
ggttaatttgrttgaaaatat

SEQ ID NO: 17934 - DNA, 21 bp, Homo sapiens
gataatggagraactgaataa

SEQ ID NO: 17935 - DNA, 21 bp, Homo sapiens
gcctaaatctktccgtattct

SEQ ID NO: 17936 - DNA, 21 bp, Homo sapiens
gctgggaaacmcaaggtcaca

SEQ ID NO: 17937 - DNA, 21 bp, Homo sapiens
agcataattgrctacaaaaaa

SEQ ID NO: 17938 - DNA, 21 bp, Homo sapiens
gctctgcagcygtgggtttct

SEQ ID NO: 17939 - DNA, 21 bp, Homo sapiens
ataattccaakaaaatactat

SEQ ID NO: 17940 - DNA, 21 bp, Homo sapiens
aatgccttctyatggtgggtg

SEQ ID NO: 17941 - DNA, 21 bp, Homo sapiens
aagccagtttwtccagtattg

SEQ ID NO: 17942 - DNA, 21 bp, Homo sapiens
gatcttagttkcctagagcac

SEQ ID NO: 17943 - DNA, 21 bp, Homo sapiens
ctaaacgaatyttcattccag

SEQ ID NO: 17944 - DNA, 21 bp, Homo sapiens
ttagcaaagtkttagttgata

SEQ ID NO: 17945 - DNA, 21 bp, Homo sapiens
tcacagtgttwatatagtcag

SEQ ID NO: 17946 - DNA, 21 bp, Homo sapiens
tcttgaattcmtatgatagta

SEQ ID NO: 17947 - DNA, 21 bp, Homo sapiens
tccagaggccrtatttggtaa

SEQ ID NO: 17948 - DNA, 21 bp, Homo sapiens
atgtttcggaytttgagctat

SEQ ID NO: 17949 - DNA, 21 bp, Homo sapiens
cttatggaagraggtcctcaa

SEQ ID NO: 17950 - DNA, 21 bp, Homo sapiens
tgagagttaayaatctgaaca

SEQ ID NO: 17951 - DNA, 21 bp, Homo sapiens
caagacactargattgcagac

SEQ ID NO: 17952 - DNA, 21 bp, Homo sapiens
gagcaatcagwgggtgacatc

SEQ ID NO: 17953 - DNA, 21 bp, Homo sapiens
attgccagacmgtttttgaaa

SEQ ID NO: 17954 - DNA, 21 bp, Homo sapiens
ttttatacacrcacgcgatgc

SEQ ID NO: 17955 - DNA, 21 bp, Homo sapiens
ctgggatggaratctgcgcca

SEQ ID NO: 17956 - DNA, 21 bp, Homo sapiens
ccataggaccsttaaccagcc

SEQ ID NO: 17957 - DNA, 21 bp, Homo sapiens
taaattacagmcttgtggacg

SEQ ID NO: 17958 - DNA, 21 bp, Homo sapiens
tgtcatttctstgccacattt

SEQ ID NO: 17959 - DNA, 21 bp, Homo sapiens
gtctagaatcyctcaagttgc

SEQ ID NO: 17960 - DNA, 21 bp, Homo sapiens
gcaaatgaatyttatcattcc

SEQ ID NO: 17961 - DNA, 21 bp, Homo sapiens
gcagttctgcrtggatctttc

SEQ ID NO: 17962 - DNA, 21 bp, Homo sapiens
aagaggcctcrgacattggtc

SEQ ID NO: 17963 - DNA, 21 bp, Homo sapiens
ctaaattagtmtttgatggat

SEQ ID NO: 17964 - DNA, 21 bp, Homo sapiens
acttctttgayggccccggtt

SEQ ID NO: 17965 - DNA, 21 bp, Homo sapiens
cctgtgcatarccagaaggtc

SEQ ID NO: 17966 - DNA, 21 bp, Homo sapiens
atcagcacgtrtcaggaattt

SEQ ID NO: 17967 - DNA, 21 bp, Homo sapiens
gcatgtccttrgatctagatc

SEQ ID NO: 17968 - DNA, 21 bp, Homo sapiens
gggcttggaaytggcagtccg

SEQ ID NO: 17969 - DNA, 21 bp, Homo sapiens
tcaaaacccawatagacagat

SEQ ID NO: 17970 - DNA, 21 bp, Homo sapiens
cttattttctkccctgtccga

SEQ ID NO: 17971 - DNA, 21 bp, Homo sapiens
gggttgacacygagtctggga

SEQ ID NO: 17972 - DNA, 21 bp, Homo sapiens
ttgtctcaaaygggcctaagg

SEQ ID NO: 17973 - DNA, 21 bp, Homo sapiens
aagcccacttrtcaaaaacta

SEQ ID NO: 17974 - DNA, 21 bp, Homo sapiens
ctggtttgccsgaactccagg

SEQ ID NO: 17975 - DNA, 21 bp, Homo sapiens
ttaaaaatacrtgcattggct

SEQ ID NO: 17976 - DNA, 21 bp, Homo sapiens
ctgtcatcacmggttgcacat

SEQ ID NO: 17977 - DNA, 21 bp, Homo sapiens
cacttctctawttaaagacta

SEQ ID NO: 17978 - DNA, 21 bp, Homo sapiens
cctaccaagawcttatgagag

SEQ ID NO: 17979 - DNA, 21 bp, Homo sapiens
tataaagacakaaatcagaac

SEQ ID NO: 17980 - DNA, 21 bp, Homo sapiens
actcaggtacragggcatctg

SEQ ID NO: 17981 - DNA, 21 bp, Homo sapiens
atgacccgtgygtgagattca

SEQ ID NO: 17982 - DNA, 21 bp, Homo sapiens
atatgtatacrgtcccagcgg

SEQ ID NO: 17983 - DNA, 21 bp, Homo sapiens
ctagttttgasttagttacag

SEQ ID NO: 17984 - DNA, 21 bp, Homo sapiens
cagaagttatstccaatcagc

SEQ ID NO: 17985 - DNA, 21 bp, Homo sapiens
gtagcagattmatttattcat

SEQ ID NO: 17986 - DNA, 21 bp, Homo sapiens
tctgtgtgcckccatagctca

SEQ ID NO: 17987 - DNA, 21 bp, Homo sapiens
atatgaaaatwcatgccctgg

SEQ ID NO: 17988 - DNA, 21 bp, Homo sapiens
atgagtgatartttttgaagt

SEQ ID NO: 17989 - DNA, 21 bp, Homo sapiens
cattacaatcyatcatgttct

SEQ ID NO: 17990 - DNA, 21 bp, Homo sapiens
gagtcagttcwaggtcaacaa

SEQ ID NO: 17991 - DNA, 21 bp, Homo sapiens
tcctctgagcrtgatgataaa

SEQ ID NO: 17992 - DNA, 21 bp, Homo sapiens
tctctgtaatwtgaataggcc

SEQ ID NO: 17993 - DNA, 21 bp, Homo sapiens
atattttaagrattttgccat

SEQ ID NO: 17994 - DNA, 21 bp, Homo sapiens
gaagactaccyagcctactcc

SEQ ID NO: 17995 - DNA, 21 bp, Homo sapiens
acacttctacrtttaagcact

SEQ ID NO: 17996 - DNA, 21 bp, Homo sapiens
agcctcaaggragatgttaat

SEQ ID NO: 17997 - DNA, 21 bp, Homo sapiens
cttttgctttyaattgggaaa

SEQ ID NO: 17998 - DNA, 21 bp, Homo sapiens
cttattcctgrtttcggacaa

SEQ ID NO: 17999 - DNA, 21 bp, Homo sapiens
atgccaaaccygacttttctg

SEQ ID NO: 18000 - DNA, 21 bp, Homo sapiens
tttatgggacmgacagatgtg

SEQ ID NO: 18001 - DNA, 21 bp, Homo sapiens
agtgacctcasacatatggca

SEQ ID NO: 18002 - DNA, 21 bp, Homo sapiens
caatttggggrcgaccacagg

SEQ ID NO: 18003 - DNA, 21 bp, Homo sapiens
tcccagagtartgaatttggg

SEQ ID NO: 18004 - DNA, 21 bp, Homo sapiens
gttcattgtascaaatcccca

SEQ ID NO: 18005 - DNA, 21 bp, Homo sapiens
ctttgcaaagraagtttcttc

SEQ ID NO: 18006 - DNA, 21 bp, Homo sapiens
tctgaacccasaagccatggc

SEQ ID NO: 18007 - DNA, 21 bp, Homo sapiens
ccagccaggcrtttcagagac

SEQ ID NO: 18008 - DNA, 21 bp, Homo sapiens
tcttctctccrtaagttggcc

SEQ ID NO: 18009 - DNA, 21 bp, Homo sapiens
tttggggtccrctgttcagag

SEQ ID NO: 18010 - DNA, 21 bp, Homo sapiens
aatctttgccstgaaatctac

SEQ ID NO: 18011 - DNA, 21 bp, Homo sapiens
ctaagtgaccrtgggcatgca

SEQ ID NO: 18012 - DNA, 21 bp, Homo sapiens
ggagctccttktattgtgtac

SEQ ID NO: 18013 - DNA, 21 bp, Homo sapiens
gttgtccgagrgctagagacc

SEQ ID NO: 18014 - DNA, 21 bp, Homo sapiens
gaagctgaacygaggatccaa

SEQ ID NO: 18015 - DNA, 21 bp, Homo sapiens
agtgtggatargcacatggcc

SEQ ID NO: 18016 - DNA, 21 bp, Homo sapiens
gatgaaaccawgtcctgtagt

SEQ ID NO: 18017 - DNA, 21 bp, Homo sapiens
tgaatgaggcrttccttggta

SEQ ID NO: 18018 - DNA, 21 bp, Homo sapiens
gtctagcacayttgtaaatat

SEQ ID NO: 18019 - DNA, 21 bp, Homo sapiens
cacctcattgrctggaagccc

SEQ ID NO: 18020 - DNA, 21 bp, Homo sapiens
cgcgaggagtrtcatcctggg

SEQ ID NO: 18021 - DNA, 21 bp, Homo sapiens
ttataacctgytaattttcat

SEQ ID NO: 18022 - DNA, 21 bp, Homo sapiens
ggctcaggtcrgctgtaagga

SEQ ID NO: 18023 - DNA, 21 bp, Homo sapiens
aaagaggtatstaaaatctcc

SEQ ID NO: 18024 - DNA, 21 bp, Homo sapiens
gtacagtttgraaaaggactg

SEQ ID NO: 18025 - DNA, 21 bp, Homo sapiens
ccactgtggtrtttctaatag

SEQ ID NO: 18026 - DNA, 21 bp, Homo sapiens
catgagggaayattcaccaga

SEQ ID NO: 18027 - DNA, 21 bp, Homo sapiens
taataaaaatrtgttttaaat

SEQ ID NO: 18028 - DNA, 21 bp, Homo sapiens
tgcttcctacrgggctcaaag

SEQ ID NO: 18029 - DNA, 21 bp, Homo sapiens
atatgttgctkaaaaaaaatt

SEQ ID NO: 18030 - DNA, 21 bp, Homo sapiens
gtttgatcgcygctggccttt

SEQ ID NO: 18031 - DNA, 21 bp, Homo sapiens
tggctggacamttgctacgtg

SEQ ID NO: 18032 - DNA, 21 bp, Homo sapiens
ttttagaatcrtaaaaaaccc

SEQ ID NO: 18033 - DNA, 21 bp, Homo sapiens
tggtcaccctraagaagggat

SEQ ID NO: 18034 - DNA, 21 bp, Homo sapiens
ttgcagcatcyaagaatccct

SEQ ID NO: 18035 - DNA, 21 bp, Homo sapiens
ttcttccatakgaactctaag

SEQ ID NO: 18036 - DNA, 21 bp, Homo sapiens
gaaaagagctmtccttgccat

SEQ ID NO: 18037 - DNA, 21 bp, Homo sapiens
tttaaagatasatccattttc

SEQ ID NO: 18038 - DNA, 21 bp, Homo sapiens
ataatgctgtmctaaaaacat

SEQ ID NO: 18039 - DNA, 21 bp, Homo sapiens
ggtttgccgcrgtagatctcc

SEQ ID NO: 18040 - DNA, 21 bp, Homo sapiens
accattgccayatcatattct

SEQ ID NO: 18041 - DNA, 21 bp, Homo sapiens
acatctcagtyttttatgcca

SEQ ID NO: 18042 - DNA, 21 bp, Homo sapiens
cagtatgaaayatagacacca

SEQ ID NO: 18043 - DNA, 21 bp, Homo sapiens
tctgcaatgawgctctaggtc

SEQ ID NO: 18044 - DNA, 21 bp, Homo sapiens
acaaaacgacwccttcataga

SEQ ID NO: 18045 - DNA, 21 bp, Homo sapiens
taatgtgtgaygatccctggt

SEQ ID NO: 18046 - DNA, 21 bp, Homo sapiens
aagggcagccratataactgg

SEQ ID NO: 18047 - DNA, 21 bp, Homo sapiens
cgttgaccccrtgctttctaa

SEQ ID NO: 18048 - DNA, 21 bp, Homo sapiens
ggcactgcttyctgcaccgct

SEQ ID NO: 18049 - DNA, 21 bp, Homo sapiens
ttcctctgagsgttgttgaac

SEQ ID NO: 18050 - DNA, 21 bp, Homo sapiens
ttttccttttrtatcaagacc

SEQ ID NO: 18051 - DNA, 21 bp, Homo sapiens
tttcttcttaytggtgcaagt

SEQ ID NO: 18052 - DNA, 21 bp, Homo sapiens
atttagaatcygagtgatcca

SEQ ID NO: 18053 - DNA, 21 bp, Homo sapiens
agggtctggcratagccgggc

SEQ ID NO: 18054 - DNA, 21 bp, Homo sapiens
ctgcctcagckgccaggagca

SEQ ID NO: 18055 - DNA, 21 bp, Homo sapiens
ctctctgcccrtcccccgaac

SEQ ID NO: 18056 - DNA, 21 bp, Homo sapiens
gccccaggaargacattacta

SEQ ID NO: 18057 - DNA, 21 bp, Homo sapiens
agaggactcgrcgcaggaggg

SEQ ID NO: 18058 - DNA, 21 bp, Homo sapiens
ttgtccccgcrttgagcgttc

SEQ ID NO: 18059 - DNA, 21 bp, Homo sapiens
caccgtgaacrcacactaaat

SEQ ID NO: 18060 - DNA, 21 bp, Homo sapiens
tggggaagggytggggaggct

SEQ ID NO: 18061 - DNA, 21 bp, Homo sapiens
ctgcaccaggkgccgagcctc

SEQ ID NO: 18062 - DNA, 21 bp, Homo sapiens
aagtccagaaygttactgcag

SEQ ID NO: 18063 - DNA, 21 bp, Homo sapiens
tgaatgagtcrtttttccgag

SEQ ID NO: 18064 - DNA, 21 bp, Homo sapiens
actggatagasctatggtgac

SEQ ID NO: 18065 - DNA, 21 bp, Homo sapiens
tatcttatgartattattgat

SEQ ID NO: 18066 - DNA, 21 bp, Homo sapiens
tgttcctaccrtactgtgggt

SEQ ID NO: 18067 - DNA, 21 bp, Homo sapiens
aaggaattgtygagtgcttga

SEQ ID NO: 18068 - DNA, 21 bp, Homo sapiens
tagatgagtaygaagccacat

SEQ ID NO: 18069 - DNA, 21 bp, Homo sapiens
atatttatctwtttttttttc

SEQ ID NO: 18070 - DNA, 21 bp, Homo sapiens
aatatttgttrctagtcgttc

SEQ ID NO: 18071 - DNA, 21 bp, Homo sapiens
actattaatcwagggtgaaag

SEQ ID NO: 18072 - DNA, 21 bp, Homo sapiens
aacaatatttsgttttgtgtc

SEQ ID NO: 18073 - DNA, 21 bp, Homo sapiens
tggtttcctaygttttctgct

SEQ ID NO: 18074 - DNA, 21 bp, Homo sapiens
gcactgtgccrtcttggaact

SEQ ID NO: 18075 - DNA, 21 bp, Homo sapiens
caaatcttaaytttttttaga

SEQ ID NO: 18076 - DNA, 21 bp, Homo sapiens
ctcatatggcrccatatcatc

SEQ ID NO: 18077 - DNA, 21 bp, Homo sapiens
gctgccgtcayatttcaattg

SEQ ID NO: 18078 - DNA, 21 bp, Homo sapiens
ggattagaggraacaagaagc

SEQ ID NO: 18079 - DNA, 21 bp, Homo sapiens
cgcaggaaackatgggcgtga

SEQ ID NO: 18080 - DNA, 21 bp, Homo sapiens
ataaagatatrtatgcacatc

SEQ ID NO: 18081 - DNA, 21 bp, Homo sapiens
tggagacaggrccccaaggaa

SEQ ID NO: 18082 - DNA, 21 bp, Homo sapiens
actttttggtwgaaatgaaaa

SEQ ID NO: 18083 - DNA, 21 bp, Homo sapiens
ctgtgtctcargtcagctagc

SEQ ID NO: 18084 - DNA, 21 bp, Homo sapiens
gtagggatgaycttggtaaca

SEQ ID NO: 18085 - DNA, 21 bp, Homo sapiens
tggatgtataytacacacaca

SEQ ID NO: 18086 - DNA, 21 bp, Homo sapiens
ttcaccatggyaaatatctgc

SEQ ID NO: 18087 - DNA, 21 bp, Homo sapiens
tgtgttctatrggagatccag

SEQ ID NO: 18088 - DNA, 21 bp, Homo sapiens
aaagcaaaatrctataaactc

SEQ ID NO: 18089 - DNA, 21 bp, Homo sapiens
ttcatgactgytcaaagtttt

SEQ ID NO: 18090 - DNA, 21 bp, Homo sapiens
ctgggctttasagtgctttac

SEQ ID NO: 18091 - DNA, 21 bp, Homo sapiens
acttgcaatcygtgcatttca

SEQ ID NO: 18092 - DNA, 21 bp, Homo sapiens
ttaaacttgargaaggaagag

SEQ ID NO: 18093 - DNA, 21 bp, Homo sapiens
ctggcatatgyaagaggaaac

SEQ ID NO: 18094 - DNA, 21 bp, Homo sapiens
aatctctaaawgaatttacta

SEQ ID NO: 18095 - DNA, 21 bp, Homo sapiens
tgctgcgcagkcgcggttcga

SEQ ID NO: 18096 - DNA, 21 bp, Homo sapiens
taccaaaatawtagctgcagt

SEQ ID NO: 18097 - DNA, 21 bp, Homo sapiens
attttggtggmtttagtaaac

SEQ ID NO: 18098 - DNA, 21 bp, Homo sapiens
gtaccttgaaratgttattcc

SEQ ID NO: 18099 - DNA, 21 bp, Homo sapiens
accggttcctmgatacctttg

SEQ ID NO: 18100 - DNA, 21 bp, Homo sapiens
attttaaaacraggtttcagt

SEQ ID NO: 18101 - DNA, 21 bp, Homo sapiens
gcaagtggtawaggagccaaa

SEQ ID NO: 18102 - DNA, 21 bp, Homo sapiens
tcatgtttcayagaaaaacct

SEQ ID NO: 18103 - DNA, 21 bp, Homo sapiens
gaaacacctcsctcactgcgg

SEQ ID NO: 18104 - DNA, 21 bp, Homo sapiens
actggatttakgtagatatat

SEQ ID NO: 18105 - DNA, 21 bp, Homo sapiens
ctcatgttggytttcaatcaa

SEQ ID NO: 18106 - DNA, 21 bp, Homo sapiens
ctacgaaagcrgcataagtat

SEQ ID NO: 18107 - DNA, 21 bp, Homo sapiens
ttaacattttkctgacaacaa

SEQ ID NO: 18108 - DNA, 21 bp, Homo sapiens
tgcaagaatcyacccctccat

SEQ ID NO: 18109 - DNA, 21 bp, Homo sapiens
aaaaaacactrtcttaaatga

SEQ ID NO: 18110 - DNA, 21 bp, Homo sapiens
taattagtgtrtattaaacaa

SEQ ID NO: 18111 - DNA, 21 bp, Homo sapiens
ctcgtcaatcytgttatgctt

SEQ ID NO: 18112 - DNA, 21 bp, Homo sapiens
agttccaactyggcagttttt

SEQ ID NO: 18113 - DNA, 21 bp, Homo sapiens
ttgcctaagartgcttaaacg

SEQ ID NO: 18114 - DNA, 21 bp, Homo sapiens
tgctcatgccytttagccact

SEQ ID NO: 18115 - DNA, 21 bp, Homo sapiens
tgaaatttggratttttgtac

SEQ ID NO: 18116 - DNA, 21 bp, Homo sapiens
gggcctccaaratgagggaag

SEQ ID NO: 18117 - DNA, 21 bp, Homo sapiens
gaagtttactstgggaacatc

SEQ ID NO: 18118 - DNA, 21 bp, Homo sapiens
gaggggcagcrgtgtcctaag

SEQ ID NO: 18119 - DNA, 21 bp, Homo sapiens
ctgctaagtayggtttttagt

SEQ ID NO: 18120 - DNA, 21 bp, Homo sapiens
aattaagctcytcatagtctt

SEQ ID NO: 18121 - DNA, 21 bp, Homo sapiens
taccttttccygtaatcccct

SEQ ID NO: 18122 - DNA, 21 bp, Homo sapiens
gatatgtgttmatctgttcca

SEQ ID NO: 18123 - DNA, 21 bp, Homo sapiens
ccccgatggcrtgcctgaggt

SEQ ID NO: 18124 - DNA, 21 bp, Homo sapiens
tgcgttctgcraagcctcttc

SEQ ID NO: 18125 - DNA, 21 bp, Homo sapiens
cccaagtactytttctgatgt

SEQ ID NO: 18126 - DNA, 21 bp, Homo sapiens
ggtaatgaaarcgttgtgatt

SEQ ID NO: 18127 - DNA, 21 bp, Homo sapiens
tttaaatcaaytctcactcag

SEQ ID NO: 18128 - DNA, 21 bp, Homo sapiens
gccatcattgytccatgcaga

SEQ ID NO: 18129 - DNA, 21 bp, Homo sapiens
cctcaaagaayttctagggaa

SEQ ID NO: 18130 - DNA, 21 bp, Homo sapiens
gacctgtcacycagagctcct

SEQ ID NO: 18131 - DNA, 21 bp, Homo sapiens
ctctaaccttrttactggctc

SEQ ID NO: 18132 - DNA, 21 bp, Homo sapiens
ttagaacccgrtgagcccatt

SEQ ID NO: 18133 - DNA, 21 bp, Homo sapiens
tgcaacctttktttccccata

SEQ ID NO: 18134 - DNA, 21 bp, Homo sapiens
tctctacaacwtatctttgac

SEQ ID NO: 18135 - DNA, 21 bp, Homo sapiens
ccagcttgccyggcgctacat

SEQ ID NO: 18136 - DNA, 21 bp, Homo sapiens
agagatggagrcacatgaaag

SEQ ID NO: 18137 - DNA, 21 bp, Homo sapiens
gattgagcacmcagtctgtct

SEQ ID NO: 18138 - DNA, 21 bp, Homo sapiens
gaagccttggsgagcacaatc

SEQ ID NO: 18139 - DNA, 21 bp, Homo sapiens
aactgaagagyatatattaat

SEQ ID NO: 18140 - DNA, 21 bp, Homo sapiens
cctcagtcacygtcctctgct

SEQ ID NO: 18141 - DNA, 21 bp, Homo sapiens
ctgcacagacwttcatcaaca

SEQ ID NO: 18142 - DNA, 21 bp, Homo sapiens
agaagtgccawgacttttcag

SEQ ID NO: 18143 - DNA, 21 bp, Homo sapiens
tcagggctagygaatcccaag

SEQ ID NO: 18144 - DNA, 21 bp, Homo sapiens
gcctcctataygtgccggaag

SEQ ID NO: 18145 - DNA, 21 bp, Homo sapiens
gatcctagagrtaagagacag

SEQ ID NO: 18146 - DNA, 21 bp, Homo sapiens
actcagagacrtcctagagac

SEQ ID NO: 18147 - DNA, 21 bp, Homo sapiens
cccagagcacrctatgggcga

SEQ ID NO: 18148 - DNA, 21 bp, Homo sapiens
acacctgtgaygtctgccgcc

SEQ ID NO: 18149 - DNA, 21 bp, Homo sapiens
ataaggaggcrcatccgcaga

SEQ ID NO: 18150 - DNA, 21 bp, Homo sapiens
cacagatggartaaaagcttt

SEQ ID NO: 18151 - DNA, 21 bp, Homo sapiens
tagaagatgaygtaaacttat

SEQ ID NO: 18152 - DNA, 21 bp, Homo sapiens
gaacctctcaygcaggccact

SEQ ID NO: 18153 - DNA, 21 bp, Homo sapiens
aaaataacacygaagcctctt

SEQ ID NO: 18154 - DNA, 21 bp, Homo sapiens
ctgtctaatcmgcttcagagc

SEQ ID NO: 18155 - DNA, 21 bp, Homo sapiens
tcatttctgtkttgggtcact

SEQ ID NO: 18156 - DNA, 21 bp, Homo sapiens
gagaaacaatyatcaagtctg

SEQ ID NO: 18157 - DNA, 21 bp, Homo sapiens
cggtggccggygggtacttgg

SEQ ID NO: 18158 - DNA, 21 bp, Homo sapiens
cttctctgtgwttgatccgag

SEQ ID NO: 18159 - DNA, 21 bp, Homo sapiens
ttataagaggycaagttcaaa

SEQ ID NO: 18160 - DNA, 21 bp, Homo sapiens
agtgaccgtcrtgtgtagtgg

SEQ ID NO: 18161 - DNA, 21 bp, Homo sapiens
gagcccaggtwggagagaata

SEQ ID NO: 18162 - DNA, 21 bp, Homo sapiens
ctttgtctgaygccaccgtgg

SEQ ID NO: 18163 - DNA, 21 bp, Homo sapiens
gagagttcccrgtcatcaagc

SEQ ID NO: 18164 - DNA, 21 bp, Homo sapiens
ccaggactcayggaccgatgc

SEQ ID NO: 18165 - DNA, 21 bp, Homo sapiens
cagccccaccygcttttccac

SEQ ID NO: 18166 - DNA, 21 bp, Homo sapiens
ctcgaggtgtygctttctcct

SEQ ID NO: 18167 - DNA, 21 bp, Homo sapiens
atttgtcaggrgctgaatgct

SEQ ID NO: 18168 - DNA, 21 bp, Homo sapiens
acaggaaatcrcccgtttcta

SEQ ID NO: 18169 - DNA, 21 bp, Homo sapiens
caaagcttagrcgactcagag

SEQ ID NO: 18170 - DNA, 21 bp, Homo sapiens
aaggatgtatrggtgaatgac

SEQ ID NO: 18171 - DNA, 21 bp, Homo sapiens
attggcataayttttggaaag

SEQ ID NO: 18172 - DNA, 21 bp, Homo sapiens
cctctattttyctcgggctgg

SEQ ID NO: 18173 - DNA, 21 bp, Homo sapiens
caccatcgagkccgctcatcc

SEQ ID NO: 18174 - DNA, 21 bp, Homo sapiens
gaggtaattayattcctaagt

SEQ ID NO: 18175 - DNA, 21 bp, Homo sapiens
gtgggcaccargcaaggtccc

SEQ ID NO: 18176 - DNA, 21 bp, Homo sapiens
agaaggacacsagggaggtga

SEQ ID NO: 18177 - DNA, 21 bp, Homo sapiens
gcatgttcaargtttttgatc

SEQ ID NO: 18178 - DNA, 21 bp, Homo sapiens
aacatggagcrgccctcatgt

SEQ ID NO: 18179 - DNA, 21 bp, Homo sapiens
tgtgtttggayctattctaag

SEQ ID NO: 18180 - DNA, 21 bp, Homo sapiens
atacaccacayacctgttaaa

SEQ ID NO: 18181 - DNA, 21 bp, Homo sapiens
tgtgtgtccgmatgggtttag

SEQ ID NO: 18182 - DNA, 21 bp, Homo sapiens
ccagaatttgmcctctgtgca

SEQ ID NO: 18183 - DNA, 21 bp, Homo sapiens
tattatctacmcactagcagt

SEQ ID NO: 18184 - DNA, 21 bp, Homo sapiens
gtccagggccrtgctaggtct

SEQ ID NO: 18185 - DNA, 21 bp, Homo sapiens
ccattttcctyatccatccac

SEQ ID NO: 18186 - DNA, 21 bp, Homo sapiens
tccaccttctkcatggcacat

SEQ ID NO: 18187 - DNA, 21 bp, Homo sapiens
aggatggccaragtgccttta

SEQ ID NO: 18188 - DNA, 21 bp, Homo sapiens
ccttctatggrtgctgtaatt

SEQ ID NO: 18189 - DNA, 21 bp, Homo sapiens
gaggctcagcrgggatggtag

SEQ ID NO: 18190 - DNA, 21 bp, Homo sapiens
ctgtctctctrattttttgga

SEQ ID NO: 18191 - DNA, 21 bp, Homo sapiens
accgaggctcrggtgccacag

SEQ ID NO: 18192 - DNA, 21 bp, Homo sapiens
tgcagaaaggygactctttag

SEQ ID NO: 18193 - DNA, 21 bp, Homo sapiens
ttgccagaacrcctgctgtaa

SEQ ID NO: 18194 - DNA, 21 bp, Homo sapiens
acactccgtamgaaaatgagc

SEQ ID NO: 18195 - DNA, 21 bp, Homo sapiens
agatgtttaakcagcctcaaa

SEQ ID NO: 18196 - DNA, 21 bp, Homo sapiens
gcaaagcagcmagctgcacct

SEQ ID NO: 18197 - DNA, 21 bp, Homo sapiens
cgaagatctcmgtgaataccc

SEQ ID NO: 18198 - DNA, 21 bp, Homo sapiens
gattgtgtgtyttctttcccc

SEQ ID NO: 18199 - DNA, 21 bp, Homo sapiens
tgcattttcaygatcttggag

SEQ ID NO: 18200 - DNA, 21 bp, Homo sapiens
gaaaagattcrgggttgattc

SEQ ID NO: 18201 - DNA, 21 bp, Homo sapiens
aagctgggacrcaataccttt

SEQ ID NO: 18202 - DNA, 21 bp, Homo sapiens
tccatcaagtmaagtcactct

SEQ ID NO: 18203 - DNA, 21 bp, Homo sapiens
cacaacacacmattttgcata

SEQ ID NO: 18204 - DNA, 21 bp, Homo sapiens
ttgaggaggcwccaccaggcc

SEQ ID NO: 18205 - DNA, 21 bp, Homo sapiens
agaagaccagytgttccagcc

SEQ ID NO: 18206 - DNA, 21 bp, Homo sapiens
gaaatcagacrgacctccaca

SEQ ID NO: 18207 - DNA, 21 bp, Homo sapiens
tggtggggtcmagatacactt

SEQ ID NO: 18208 - DNA, 21 bp, Homo sapiens
ttgtgtttttkaacatactca

SEQ ID NO: 18209 - DNA, 21 bp, Homo sapiens
aaactgcccaygatgaaggtt

SEQ ID NO: 18210 - DNA, 21 bp, Homo sapiens
ttctgtcaccygagggcttcg

SEQ ID NO: 18211 - DNA, 21 bp, Homo sapiens
aataagaggaygattgtataa

SEQ ID NO: 18212 - DNA, 21 bp, Homo sapiens
taagacaggastttggtggtg

SEQ ID NO: 18213 - DNA, 21 bp, Homo sapiens
tagtaacaaasaaacctaatt

SEQ ID NO: 18214 - DNA, 21 bp, Homo sapiens
gaggatgttcygcaaatttgc

SEQ ID NO: 18215 - DNA, 21 bp, Homo sapiens
tacaacgttasgtgctcctct

SEQ ID NO: 18216 - DNA, 21 bp, Homo sapiens
tacaaagcagsatcaaaagca

SEQ ID NO: 18217 - DNA, 21 bp, Homo sapiens
aatgaagcaaygataatgaag

SEQ ID NO: 18218 - DNA, 21 bp, Homo sapiens
atcctcaatgytacctggcca

SEQ ID NO: 18219 - DNA, 21 bp, Homo sapiens
gtaatttgccrggaggctaaa

SEQ ID NO: 18220 - DNA, 21 bp, Homo sapiens
tttttcaataygtgtaaagcc

SEQ ID NO: 18221 - DNA, 21 bp, Homo sapiens
ccagtttcctwctcctcacag

SEQ ID NO: 18222 - DNA, 21 bp, Homo sapiens
taggttcacayttcaggtggt

SEQ ID NO: 18223 - DNA, 21 bp, Homo sapiens
ctcagggccgrgcagagcttt

SEQ ID NO: 18224 - DNA, 21 bp, Homo sapiens
tgtggtgagckcaggtatcct

SEQ ID NO: 18225 - DNA, 21 bp, Homo sapiens
tcttagaaacsttgtatgacc

SEQ ID NO: 18226 - DNA, 21 bp, Homo sapiens
tggggtcaaaytttcgatttt

SEQ ID NO: 18227 - DNA, 21 bp, Homo sapiens
agtctaaaagyaggcacccac

SEQ ID NO: 18228 - DNA, 21 bp, Homo sapiens
gctggaagccrtctgctgctg

SEQ ID NO: 18229 - DNA, 21 bp, Homo sapiens
taatggggttrggctgctcgg

SEQ ID NO: 18230 - DNA, 21 bp, Homo sapiens
agcagagaccstgccatccct

SEQ ID NO: 18231 - DNA, 21 bp, Homo sapiens
gatttcctaayggggacatcc

SEQ ID NO: 18232 - DNA, 21 bp, Homo sapiens
ctggctctatrgtgggtgctt

SEQ ID NO: 18233 - DNA, 21 bp, Homo sapiens
tttgtttttgytttaaaaggc

SEQ ID NO: 18234 - DNA, 21 bp, Homo sapiens
aagccactagmgaaatgaacc

SEQ ID NO: 18235 - DNA, 21 bp, Homo sapiens
ttcggggaacwcacaggagga

SEQ ID NO: 18236 - DNA, 21 bp, Homo sapiens
ctggacctccrctgaaggcaa

SEQ ID NO: 18237 - DNA, 21 bp, Homo sapiens
atcacagacargctctcaccg

SEQ ID NO: 18238 - DNA, 21 bp, Homo sapiens
tccagaatttwaaaatatgac

SEQ ID NO: 18239 - DNA, 21 bp, Homo sapiens
ggcaaagttgygacacaaaaa

SEQ ID NO: 18240 - DNA, 21 bp, Homo sapiens
atttgtaaacygtgaaaaccc

SEQ ID NO: 18241 - DNA, 21 bp, Homo sapiens
aaccgcactcwaaccctctag

SEQ ID NO: 18242 - DNA, 21 bp, Homo sapiens
catttctaaastttgggtggt

SEQ ID NO: 18243 - DNA, 21 bp, Homo sapiens
ctgcaaccttygggaggtcta

SEQ ID NO: 18244 - DNA, 21 bp, Homo sapiens
agtttgctttygacaatttac

SEQ ID NO: 18245 - DNA, 21 bp, Homo sapiens
agagttctccyggaccttgtg

SEQ ID NO: 18246 - DNA, 21 bp, Homo sapiens
agtaggactgycttgatggca

SEQ ID NO: 18247 - DNA, 21 bp, Homo sapiens
agttggcaacragacgggcaa

SEQ ID NO: 18248 - DNA, 21 bp, Homo sapiens
acattcgctcrcttcgtgctt

SEQ ID NO: 18249 - DNA, 21 bp, Homo sapiens
tcagggaatakcagggctttg

SEQ ID NO: 18250 - DNA, 21 bp, Homo sapiens
ggtgtgcaccrggagaagaaa

SEQ ID NO: 18251 - DNA, 21 bp, Homo sapiens
tgagaaaggaygggaacacac

SEQ ID NO: 18252 - DNA, 21 bp, Homo sapiens
attcttggaarttatgaataa

SEQ ID NO: 18253 - DNA, 21 bp, Homo sapiens
tgtttaatccyggaagtcaca

SEQ ID NO: 18254 - DNA, 21 bp, Homo sapiens
atcctctctcrtccagctggg

SEQ ID NO: 18255 - DNA, 21 bp, Homo sapiens
tctctcaagtyccacttatgt

SEQ ID NO: 18256 - DNA, 21 bp, Homo sapiens
tccctcaacgrtcagaactgg

SEQ ID NO: 18257 - DNA, 21 bp, Homo sapiens
aacaatacaamatctagcact

SEQ ID NO: 18258 - DNA, 21 bp, Homo sapiens
aaacagtcatkaagagatcca

SEQ ID NO: 18259 - DNA, 21 bp, Homo sapiens
cagccagtgaygcccctcacc

SEQ ID NO: 18260 - DNA, 21 bp, Homo sapiens
tgaaaaccatsagaccgtcgg

SEQ ID NO: 18261 - DNA, 21 bp, Homo sapiens
tggctcaaatrcacctggagg

SEQ ID NO: 18262 - DNA, 21 bp, Homo sapiens
gcagacctggygcccctgctt

SEQ ID NO: 18263 - DNA, 21 bp, Homo sapiens
agctattggcygtccttcccc

SEQ ID NO: 18264 - DNA, 21 bp, Homo sapiens
cttgggtccarattgtgaaac

SEQ ID NO: 18265 - DNA, 21 bp, Homo sapiens
ccctgggacgwtagcaaaaca

SEQ ID NO: 18266 - DNA, 21 bp, Homo sapiens
aggtagagggracactggacc

SEQ ID NO: 18267 - DNA, 21 bp, Homo sapiens
ttctctccccrgagctgagta

SEQ ID NO: 18268 - DNA, 21 bp, Homo sapiens
tctattgagcrcctactgtat

SEQ ID NO: 18269 - DNA, 21 bp, Homo sapiens
aggttccagcyggcgtaatca

SEQ ID NO: 18270 - DNA, 21 bp, Homo sapiens
agaggacctcrctggggttgg

SEQ ID NO: 18271 - DNA, 21 bp, Homo sapiens
ctgagtgaagkgtgggaaaat

SEQ ID NO: 18272 - DNA, 21 bp, Homo sapiens
tttagtttctscttatctccc

SEQ ID NO: 18273 - DNA, 21 bp, Homo sapiens
catagaggtasctatctggtg

SEQ ID NO: 18274 - DNA, 21 bp, Homo sapiens
catgcctctgstccttggact

SEQ ID NO: 18275 - DNA, 21 bp, Homo sapiens
gttgacctatyggtgcaccgc

SEQ ID NO: 18276 - DNA, 21 bp, Homo sapiens
aggagtgagcyacggatgccg

SEQ ID NO: 18277 - DNA, 21 bp, Homo sapiens
tcttggcattkcctggaagac

SEQ ID NO: 18278 - DNA, 21 bp, Homo sapiens
attcattgcaycccttcccag

SEQ ID NO: 18279 - DNA, 21 bp, Homo sapiens
ggtgcctcttkttttaacctt

SEQ ID NO: 18280 - DNA, 21 bp, Homo sapiens
ccacttagtcrtttcagtgat

SEQ ID NO: 18281 - DNA, 21 bp, Homo sapiens
atataaacaarctcagtgaca

SEQ ID NO: 18282 - DNA, 21 bp, Homo sapiens
ccagctgctgytctactgtgc

SEQ ID NO: 18283 - DNA, 21 bp, Homo sapiens
tatggaaatgytggaggagca

SEQ ID NO: 18284 - DNA, 21 bp, Homo sapiens
tttgcctacaytgggcctgaa

SEQ ID NO: 18285 - DNA, 21 bp, Homo sapiens
ccagtcttggktcactcctga

SEQ ID NO: 18286 - DNA, 21 bp, Homo sapiens
tacaaacacayacattgctga

SEQ ID NO: 18287 - DNA, 21 bp, Homo sapiens
acatccttatrggcactgaga

SEQ ID NO: 18288 - DNA, 21 bp, Homo sapiens
ccactcatttrtatagctatc

SEQ ID NO: 18289 - DNA, 21 bp, Homo sapiens
tctttccttcrgcacgtccca

SEQ ID NO: 18290 - DNA, 21 bp, Homo sapiens
cccaaggtacyctgccctgaa

SEQ ID NO: 18291 - DNA, 21 bp, Homo sapiens
catacatcacrtaggaactgt

SEQ ID NO: 18292 - DNA, 21 bp, Homo sapiens
atacacataartaactaggca

SEQ ID NO: 18293 - DNA, 21 bp, Homo sapiens
aatgaagactsttgtgggaga

SEQ ID NO: 18294 - DNA, 21 bp, Homo sapiens
taatttggtcycagccatggt

SEQ ID NO: 18295 - DNA, 21 bp, Homo sapiens
ttgcagaaagrtaagtagcac

SEQ ID NO: 18296 - DNA, 21 bp, Homo sapiens
tagtggtttcyaactttaggg

SEQ ID NO: 18297 - DNA, 21 bp, Homo sapiens
gagggtgcctycacatcacag

SEQ ID NO: 18298 - DNA, 21 bp, Homo sapiens
tgctgtactcrgatattcatt

SEQ ID NO: 18299 - DNA, 21 bp, Homo sapiens
tttgttgataygtatctaatt

SEQ ID NO: 18300 - DNA, 21 bp, Homo sapiens
tcttttctcayttgcctgtct

SEQ ID NO: 18301 - DNA, 21 bp, Homo sapiens
ttcctgggctyccaatattgt

SEQ ID NO: 18302 - DNA, 21 bp, Homo sapiens
tacacaagtaracaagatttc

SEQ ID NO: 18303 - DNA, 21 bp, Homo sapiens
ccaaggtctaygatgaacaat

SEQ ID NO: 18304 - DNA, 21 bp, Homo sapiens
taagaggatcyagaaaggata

SEQ ID NO: 18305 - DNA, 21 bp, Homo sapiens
gaaaaactatygttgtacttc

SEQ ID NO: 18306 - DNA, 21 bp, Homo sapiens
atttgtaagaktaagcagcct

SEQ ID NO: 18307 - DNA, 21 bp, Homo sapiens
gaaataccagrgcgtgataga

SEQ ID NO: 18308 - DNA, 21 bp, Homo sapiens
tatcccagcaygtttgcagag

SEQ ID NO: 18309 - DNA, 21 bp, Homo sapiens
tgaattaataktatcctccat

SEQ ID NO: 18310 - DNA, 21 bp, Homo sapiens
acaatgaaggwcccagtgtct

SEQ ID NO: 18311 - DNA, 21 bp, Homo sapiens
tgtttagtggmcaattttttc

SEQ ID NO: 18312 - DNA, 21 bp, Homo sapiens
ctccgagttcracgcatttcc

SEQ ID NO: 18313 - DNA, 21 bp, Homo sapiens
atgtaattggmatttttcgtt

SEQ ID NO: 18314 - DNA, 21 bp, Homo sapiens
gaccaaaaaasgaagaagctg

SEQ ID NO: 18315 - DNA, 21 bp, Homo sapiens
ctgttatgaawtacagatata

SEQ ID NO: 18316 - DNA, 21 bp, Homo sapiens
tccctttaccrcaaggcaggg

SEQ ID NO: 18317 - DNA, 21 bp, Homo sapiens
ttctgttgacrttttcaaaca

SEQ ID NO: 18318 - DNA, 21 bp, Homo sapiens
atgcaatatgraagtgcctat

SEQ ID NO: 18319 - DNA, 21 bp, Homo sapiens
gacaaagcttyttaattgttt

SEQ ID NO: 18320 - DNA, 21 bp, Homo sapiens
gcttttcctgyccccagtcct

SEQ ID NO: 18321 - DNA, 21 bp, Homo sapiens
ttgccctgtckccagtatggc

SEQ ID NO: 18322 - DNA, 21 bp, Homo sapiens
cttcaggtaakaaaaagcctg

SEQ ID NO: 18323 - DNA, 21 bp, Homo sapiens
gggcataaaaygtgtggggtt

SEQ ID NO: 18324 - DNA, 21 bp, Homo sapiens
gcatacattgkatatcgtgac

SEQ ID NO: 18325 - DNA, 21 bp, Homo sapiens
atttcacacarcaataactag

SEQ ID NO: 18326 - DNA, 21 bp, Homo sapiens
tactcctcagycaacaaatat

SEQ ID NO: 18327 - DNA, 21 bp, Homo sapiens
acctttccccracatttgccg

SEQ ID NO: 18328 - DNA, 21 bp, Homo sapiens
agagcaaatcratgaaggtcc

SEQ ID NO: 18329 - DNA, 21 bp, Homo sapiens
tagtaaaataygtgcattttc

SEQ ID NO: 18330 - DNA, 21 bp, Homo sapiens
ttttggtttasaagcaccttt

SEQ ID NO: 18331 - DNA, 21 bp, Homo sapiens
tctatagggcytggcaacaac

SEQ ID NO: 18332 - DNA, 21 bp, Homo sapiens
ggtgcagaccytgcatttgtc

SEQ ID NO: 18333 - DNA, 21 bp, Homo sapiens
tactgatattygtgaatttag

SEQ ID NO: 18334 - DNA, 21 bp, Homo sapiens
atcattctcawgttgtttcct

SEQ ID NO: 18335 - DNA, 21 bp, Homo sapiens
ataatcttctsccatttattt

SEQ ID NO: 18336 - DNA, 21 bp, Homo sapiens
acactcctgargcgaagggta

SEQ ID NO: 18337 - DNA, 21 bp, Homo sapiens
tacaggttgcrcatattctat

SEQ ID NO: 18338 - DNA, 21 bp, Homo sapiens
gactttgaaayggaaacagaa

SEQ ID NO: 18339 - DNA, 21 bp, Homo sapiens
acataaatccrtttttccagg

SEQ ID NO: 18340 - DNA, 21 bp, Homo sapiens
cccaaaataaytgagtgttat

SEQ ID NO: 18341 - DNA, 21 bp, Homo sapiens
ctgtaacgtgrcatggccttt

SEQ ID NO: 18342 - DNA, 21 bp, Homo sapiens
accctcaaccrtgttacttct

SEQ ID NO: 18343 - DNA, 21 bp, Homo sapiens
gaataattttraggaattgtg

SEQ ID NO: 18344 - DNA, 21 bp, Homo sapiens
ggagccacaaktgtttgcagt

SEQ ID NO: 18345 - DNA, 21 bp, Homo sapiens
tttccctcagmtctttgggtt

SEQ ID NO: 18346 - DNA, 21 bp, Homo sapiens
gttacattgtrctggtaaagt

SEQ ID NO: 18347 - DNA, 21 bp, Homo sapiens
cctgcatgtasttatgtaaac

SEQ ID NO: 18348 - DNA, 21 bp, Homo sapiens
ttctctctacktatcagtggt

SEQ ID NO: 18349 - DNA, 21 bp, Homo sapiens
catacgtatarggagtaaggc

SEQ ID NO: 18350 - DNA, 21 bp, Homo sapiens
tgacatttgtsttaatcagaa

SEQ ID NO: 18351 - DNA, 21 bp, Homo sapiens
tgttatcaccygctgtgtgat

SEQ ID NO: 18352 - DNA, 21 bp, Homo sapiens
atatgtagatygtgaaagtga

SEQ ID NO: 18353 - DNA, 21 bp, Homo sapiens
attaacaactyggcgatgccc

SEQ ID NO: 18354 - DNA, 21 bp, Homo sapiens
tggctattggyggccctgggg

SEQ ID NO: 18355 - DNA, 21 bp, Homo sapiens
gtcaaatgggscatcattctg

SEQ ID NO: 18356 - DNA, 21 bp, Homo sapiens
tttttggatcyaagtgatgga

SEQ ID NO: 18357 - DNA, 21 bp, Homo sapiens
ggaaggtattytacagacatt

SEQ ID NO: 18358 - DNA, 21 bp, Homo sapiens
gaagtcattgmatagagggta

SEQ ID NO: 18359 - DNA, 21 bp, Homo sapiens
atagaataacyctctgtcagt

SEQ ID NO: 18360 - DNA, 21 bp, Homo sapiens
tctttcttctrttccagggtg

SEQ ID NO: 18361 - DNA, 21 bp, Homo sapiens
tctatttaatrtcaggcatgt

SEQ ID NO: 18362 - DNA, 21 bp, Homo sapiens
acaaatacaaygtacttacaa

SEQ ID NO: 18363 - DNA, 21 bp, Homo sapiens
ggggagcagtratgtgtttag

SEQ ID NO: 18364 - DNA, 21 bp, Homo sapiens
gtacagtcacrgatgaacaca

SEQ ID NO: 18365 - DNA, 21 bp, Homo sapiens
catattaaacrtattttaaat

SEQ ID NO: 18366 - DNA, 21 bp, Homo sapiens
tgatgtctagkttttatttca

SEQ ID NO: 18367 - DNA, 21 bp, Homo sapiens
gtactcacgcyagtccacact

SEQ ID NO: 18368 - DNA, 21 bp, Homo sapiens
accttaagaaytgatgcaagt

SEQ ID NO: 18369 - DNA, 21 bp, Homo sapiens
atgcagaaaarcatgtaagat

SEQ ID NO: 18370 - DNA, 21 bp, Homo sapiens
ccatctattgstttctctttg

SEQ ID NO: 18371 - DNA, 21 bp, Homo sapiens
acctcattcaytgtggctact

SEQ ID NO: 18372 - DNA, 21 bp, Homo sapiens
tcattgcattygccatttact

SEQ ID NO: 18373 - DNA, 21 bp, Homo sapiens
tcagtggaacmtacggattga

SEQ ID NO: 18374 - DNA, 21 bp, Homo sapiens
gaaaaaccaargcaaaagact

SEQ ID NO: 18375 - DNA, 21 bp, Homo sapiens
gagggaagaamaccttgtggg

SEQ ID NO: 18376 - DNA, 21 bp, Homo sapiens
atgcagacatygtaagactgc

SEQ ID NO: 18377 - DNA, 21 bp, Homo sapiens
aagtggtgaasgctgaggagt

SEQ ID NO: 18378 - DNA, 21 bp, Homo sapiens
cacacagtagsccaccagtgc

SEQ ID NO: 18379 - DNA, 21 bp, Homo sapiens
ctgcgaggctrcattttcaac

SEQ ID NO: 18380 - DNA, 21 bp, Homo sapiens
tcctatcctartacctttgca

SEQ ID NO: 18381 - DNA, 21 bp, Homo sapiens
atttttgctaygtaagacctg

SEQ ID NO: 18382 - DNA, 21 bp, Homo sapiens
tatttgctagycagaaggcct

SEQ ID NO: 18383 - DNA, 21 bp, Homo sapiens
tataccccttraaagagaatc

SEQ ID NO: 18384 - DNA, 21 bp, Homo sapiens
gataatttgcrtattttagtt

SEQ ID NO: 18385 - DNA, 21 bp, Homo sapiens
agaaaatggcstgatgttgat

SEQ ID NO: 18386 - DNA, 21 bp, Homo sapiens
cttgttccatrgagcatgatt

SEQ ID NO: 18387 - DNA, 21 bp, Homo sapiens
gtttgcgctgytgctgtcctc

SEQ ID NO: 18388 - DNA, 21 bp, Homo sapiens
ctgtcacaaaygggtggcatg

SEQ ID NO: 18389 - DNA, 21 bp, Homo sapiens
aggccatgagwtttcctttct

SEQ ID NO: 18390 - DNA, 21 bp, Homo sapiens
gggagaaatckgatttgggaa

SEQ ID NO: 18391 - DNA, 21 bp, Homo sapiens
tcagttcttayagtgagaaga

SEQ ID NO: 18392 - DNA, 21 bp, Homo sapiens
taattgcagtscttcttccca

SEQ ID NO: 18393 - DNA, 21 bp, Homo sapiens
tttcatcatcraaattgccta

SEQ ID NO: 18394 - DNA, 21 bp, Homo sapiens
tatactgtagsgggtggaggg

SEQ ID NO: 18395 - DNA, 21 bp, Homo sapiens
aaaagcgccaygagcacagag

SEQ ID NO: 18396 - DNA, 21 bp, Homo sapiens
tacttcttccygtggagcagg

SEQ ID NO: 18397 - DNA, 21 bp, Homo sapiens
tcacaaacagkcaatagctcc

SEQ ID NO: 18398 - DNA, 21 bp, Homo sapiens
atttgggtgcrttagtgcgtg

SEQ ID NO: 18399 - DNA, 21 bp, Homo sapiens
atgccaatgcrtgtgttggac

SEQ ID NO: 18400 - DNA, 21 bp, Homo sapiens
caataatactracaggctcat

SEQ ID NO: 18401 - DNA, 21 bp, Homo sapiens
gtcagcacggracccacatca

SEQ ID NO: 18402 - DNA, 21 bp, Homo sapiens
attgtagttaygccttttgga

SEQ ID NO: 18403 - DNA, 21 bp, Homo sapiens
agaaatcctaygtgcatgctt

SEQ ID NO: 18404 - DNA, 21 bp, Homo sapiens
ctatgtgtgtsaccctgaaag

SEQ ID NO: 18405 - DNA, 21 bp, Homo sapiens
ggagaagtcayttgcgagaaa

SEQ ID NO: 18406 - DNA, 21 bp, Homo sapiens
ttgctttggamgggaaattga

SEQ ID NO: 18407 - DNA, 21 bp, Homo sapiens
ccaagttagcstgtggaagtg

SEQ ID NO: 18408 - DNA, 21 bp, Homo sapiens
agtgcagtagkccatccacat

SEQ ID NO: 18409 - DNA, 21 bp, Homo sapiens
aagaaagtgcsattgaaacag

SEQ ID NO: 18410 - DNA, 21 bp, Homo sapiens
ggcttaggatktttgtatttc

SEQ ID NO: 18411 - DNA, 21 bp, Homo sapiens
acaggatggcrttagtgtgtt

SEQ ID NO: 18412 - DNA, 21 bp, Homo sapiens
tcaatggttcyataggtccct

SEQ ID NO: 18413 - DNA, 21 bp, Homo sapiens
ttgtcttacarttgaaccaac

SEQ ID NO: 18414 - DNA, 21 bp, Homo sapiens
actgaccactsaggctgaata

SEQ ID NO: 18415 - DNA, 21 bp, Homo sapiens
tctgaacaccraagcatatag

SEQ ID NO: 18416 - DNA, 21 bp, Homo sapiens
ttttgcgttcrctttttgacc

SEQ ID NO: 18417 - DNA, 21 bp, Homo sapiens
accttaatatkacattgcaca

SEQ ID NO: 18418 - DNA, 21 bp, Homo sapiens
gaacttttctragcacacaag

SEQ ID NO: 18419 - DNA, 21 bp, Homo sapiens
tatggcatgtkgatatatgtc

SEQ ID NO: 18420 - DNA, 21 bp, Homo sapiens
tggcctccacsgtgccgcatt

SEQ ID NO: 18421 - DNA, 21 bp, Homo sapiens
agtcataattyaacttgtatg

SEQ ID NO: 18422 - DNA, 21 bp, Homo sapiens
tttcaagctcyttttatgcac

SEQ ID NO: 18423 - DNA, 21 bp, Homo sapiens
atggagttgaytctaagaccc

SEQ ID NO: 18424 - DNA, 21 bp, Homo sapiens
taaaaatacayattacaagtt

SEQ ID NO: 18425 - DNA, 21 bp, Homo sapiens
acctgcttagycatacaggat

SEQ ID NO: 18426 - DNA, 21 bp, Homo sapiens
atctaggcatrgtaatcatgt

SEQ ID NO: 18427 - DNA, 21 bp, Homo sapiens
aaatgtcaggrtgagaatgtg

SEQ ID NO: 18428 - DNA, 21 bp, Homo sapiens
ttgtctcactracttgatgag

SEQ ID NO: 18429 - DNA, 21 bp, Homo sapiens
taataagtgcwaatcaacagc

SEQ ID NO: 18430 - DNA, 21 bp, Homo sapiens
tctccgtccamtttattctta

SEQ ID NO: 18431 - DNA, 21 bp, Homo sapiens
ccactactgakccttgtgctg

SEQ ID NO: 18432 - DNA, 21 bp, Homo sapiens
cattttactcmtatgccatat

SEQ ID NO: 18433 - DNA, 21 bp, Homo sapiens
aatcactggaygctagaaaat

SEQ ID NO: 18434 - DNA, 21 bp, Homo sapiens
tagggtaataygttaagtgga

SEQ ID NO: 18435 - DNA, 21 bp, Homo sapiens
caactgcaccrgtcccctact

SEQ ID NO: 18436 - DNA, 21 bp, Homo sapiens
gaaaaatggarttaaagtgta

SEQ ID NO: 18437 - DNA, 21 bp, Homo sapiens
agctcctagckcatgtgaaca

SEQ ID NO: 18438 - DNA, 21 bp, Homo sapiens
cattagaggcrgtcatggagc

SEQ ID NO: 18439 - DNA, 21 bp, Homo sapiens
tgggatgatgrtcattatcta

SEQ ID NO: 18440 - DNA, 21 bp, Homo sapiens
tcatccgacastgagtatgtg

SEQ ID NO: 18441 - DNA, 21 bp, Homo sapiens
agaaagcattrgggttattca

SEQ ID NO: 18442 - DNA, 21 bp, Homo sapiens
tatctactagrattgttggta

SEQ ID NO: 18443 - DNA, 21 bp, Homo sapiens
ttttgcatgtwtgtaactctt

SEQ ID NO: 18444 - DNA, 21 bp, Homo sapiens
caccattgaaygtctaagaaa

SEQ ID NO: 18445 - DNA, 21 bp, Homo sapiens
tcattttgatwaaggaccatt

SEQ ID NO: 18446 - DNA, 21 bp, Homo sapiens
ctgcatttgaktttggccttg

SEQ ID NO: 18447 - DNA, 21 bp, Homo sapiens
tgggccttctmttcagaacta

SEQ ID NO: 18448 - DNA, 21 bp, Homo sapiens
gagggaaatcratattcacta

SEQ ID NO: 18449 - DNA, 21 bp, Homo sapiens
aaacacaaccytagggaagat

SEQ ID NO: 18450 - DNA, 21 bp, Homo sapiens
catgtgaactwcagcagacta

SEQ ID NO: 18451 - DNA, 21 bp, Homo sapiens
aaactttacastgagaagtct

SEQ ID NO: 18452 - DNA, 21 bp, Homo sapiens
tgcataacatrtatgatgtca

SEQ ID NO: 18453 - DNA, 21 bp, Homo sapiens
gggcacacatrtgcctcaaca

SEQ ID NO: 18454 - DNA, 21 bp, Homo sapiens
actcaagctgwaaatctatga

SEQ ID NO: 18455 - DNA, 21 bp, Homo sapiens
gtattcctttstctctttggt

SEQ ID NO: 18456 - DNA, 21 bp, Homo sapiens
ctggggtcagrgaaggaaagg

SEQ ID NO: 18457 - DNA, 21 bp, Homo sapiens
ctttgaatagraagtgtctga

SEQ ID NO: 18458 - DNA, 21 bp, Homo sapiens
aacatctcagrgatcagccag

SEQ ID NO: 18459 - DNA, 21 bp, Homo sapiens
acagaaaactygtaatatttg

SEQ ID NO: 18460 - DNA, 21 bp, Homo sapiens
ttgttgattgwccaaatctga

SEQ ID NO: 18461 - DNA, 21 bp, Homo sapiens
ctctcattgarcctcagaaag

SEQ ID NO: 18462 - DNA, 21 bp, Homo sapiens
gatgtggaagyaccttttgag

SEQ ID NO: 18463 - DNA, 21 bp, Homo sapiens
ctaaggcagaytgtgagcata

SEQ ID NO: 18464 - DNA, 21 bp, Homo sapiens
aagctgagttsacagaatgcc

SEQ ID NO: 18465 - DNA, 21 bp, Homo sapiens
tcccagatctyctttcctaaa

SEQ ID NO: 18466 - DNA, 21 bp, Homo sapiens
ggaagaagccwtgggacacag

SEQ ID NO: 18467 - DNA, 21 bp, Homo sapiens
tttatcatctygtaatggtgt

SEQ ID NO: 18468 - DNA, 21 bp, Homo sapiens
acatggtggayaatattctgg

SEQ ID NO: 18469 - DNA, 21 bp, Homo sapiens
ttttattttaycttcatttac

SEQ ID NO: 18470 - DNA, 21 bp, Homo sapiens
gtactcacccmttgaccaacc

SEQ ID NO: 18471 - DNA, 21 bp, Homo sapiens
gaagaaccacrtagacccagg

SEQ ID NO: 18472 - DNA, 21 bp, Homo sapiens
caggcaagatrgtggtttaca

SEQ ID NO: 18473 - DNA, 21 bp, Homo sapiens
aaaacccacaragaaacggac

SEQ ID NO: 18474 - DNA, 21 bp, Homo sapiens
cacatgagacrtatccaaaca

SEQ ID NO: 18475 - DNA, 21 bp, Homo sapiens
ccattttccartcacccctga

SEQ ID NO: 18476 - DNA, 21 bp, Homo sapiens
aggattcaacrggtttccaca

SEQ ID NO: 18477 - DNA, 21 bp, Homo sapiens
atatggaatgmacacaactca

SEQ ID NO: 18478 - DNA, 21 bp, Homo sapiens
tgttgtctagwtagaagagca

SEQ ID NO: 18479 - DNA, 21 bp, Homo sapiens
tcagatgactytggtctccag

SEQ ID NO: 18480 - DNA, 21 bp, Homo sapiens
aaataacattyttctgtgctt

SEQ ID NO: 18481 - DNA, 21 bp, Homo sapiens
cttaactcctrtaacactaga

SEQ ID NO: 18482 - DNA, 21 bp, Homo sapiens
agccttttggkgtttacactt

SEQ ID NO: 18483 - DNA, 21 bp, Homo sapiens
ccagaacttamgaggagaaag

SEQ ID NO: 18484 - DNA, 21 bp, Homo sapiens
ccgtttgtgawcaagtgctgt

SEQ ID NO: 18485 - DNA, 21 bp, Homo sapiens
ctatattgtarcccaactgaa

SEQ ID NO: 18486 - DNA, 21 bp, Homo sapiens
atctttttcaytgatgaccac

SEQ ID NO: 18487 - DNA, 21 bp, Homo sapiens
atgatctgtayggcttgaaag

SEQ ID NO: 18488 - DNA, 21 bp, Homo sapiens
tcctctattayatggttgtgc

SEQ ID NO: 18489 - DNA, 21 bp, Homo sapiens
aattgtctgaraggatctcca

SEQ ID NO: 18490 - DNA, 21 bp, Homo sapiens
ctcttctattratgactctca

SEQ ID NO: 18491 - DNA, 21 bp, Homo sapiens
taaatttaagrtcctgggaag

SEQ ID NO: 18492 - DNA, 21 bp, Homo sapiens
tcaaggtgtarcaaagaatac

SEQ ID NO: 18493 - DNA, 21 bp, Homo sapiens
gggtacaggawgattggaagg

SEQ ID NO: 18494 - DNA, 21 bp, Homo sapiens
aatatgcaagyagatgttgac

SEQ ID NO: 18495 - DNA, 21 bp, Homo sapiens
aataactgatrcattatgtgt

SEQ ID NO: 18496 - DNA, 21 bp, Homo sapiens
agtcattcagktatccagact

SEQ ID NO: 18497 - DNA, 21 bp, Homo sapiens
ggcttagtttkgttgcttatt

SEQ ID NO: 18498 - DNA, 21 bp, Homo sapiens
agtgatgttgygactcatttg

SEQ ID NO: 18499 - DNA, 21 bp, Homo sapiens
accatacttgraaaaattcta

SEQ ID NO: 18500 - DNA, 21 bp, Homo sapiens
tgataggtagyttgaattttc

SEQ ID NO: 18501 - DNA, 21 bp, Homo sapiens
ttaatttgatyctgtgttctc

SEQ ID NO: 18502 - DNA, 21 bp, Homo sapiens
tcagcttcctyatattgtttc

SEQ ID NO: 18503 - DNA, 21 bp, Homo sapiens
caaacaaaccyacttaaagaa

SEQ ID NO: 18504 - DNA, 21 bp, Homo sapiens
taatctattartcaaaatgtg

SEQ ID NO: 18505 - DNA, 21 bp, Homo sapiens
agttttagaasagtggctaaa

SEQ ID NO: 18506 - DNA, 21 bp, Homo sapiens
ttgctgcaagwtttgggtttg

SEQ ID NO: 18507 - DNA, 21 bp, Homo sapiens
aaagtgctttktaaagtatca

SEQ ID NO: 18508 - DNA, 21 bp, Homo sapiens
gagcaataacratgatagtga

SEQ ID NO: 18509 - DNA, 21 bp, Homo sapiens
taatctgtcartgactacaag

SEQ ID NO: 18510 - DNA, 21 bp, Homo sapiens
tggaggagagrgaataaaagt

SEQ ID NO: 18511 - DNA, 21 bp, Homo sapiens
atatccctagrtagatggcat

SEQ ID NO: 18512 - DNA, 21 bp, Homo sapiens
gttttagaacyatagctttac

SEQ ID NO: 18513 - DNA, 21 bp, Homo sapiens
ctgcaatatcwcataagtcag

SEQ ID NO: 18514 - DNA, 21 bp, Homo sapiens
catcattgctmagtattctgg

SEQ ID NO: 18515 - DNA, 21 bp, Homo sapiens
agctggtaatragctgaaata

SEQ ID NO: 18516 - DNA, 21 bp, Homo sapiens
cagctaggctktaggaaccta

SEQ ID NO: 18517 - DNA, 21 bp, Homo sapiens
tcaaattccayggtaaattag

SEQ ID NO: 18518 - DNA, 21 bp, Homo sapiens
cttccagaatrtttcaacagc

SEQ ID NO: 18519 - DNA, 21 bp, Homo sapiens
tgtcaatcagwtttccttttt

SEQ ID NO: 18520 - DNA, 21 bp, Homo sapiens
gatatagtcartgatgttttg

SEQ ID NO: 18521 - DNA, 21 bp, Homo sapiens
attattataargtgtataatt

SEQ ID NO: 18522 - DNA, 21 bp, Homo sapiens
ctcaagaatcycttagacaag

SEQ ID NO: 18523 - DNA, 21 bp, Homo sapiens
ttaaggacagkgttcaaattc

SEQ ID NO: 18524 - DNA, 21 bp, Homo sapiens
agggtcacagycaaaactgag

SEQ ID NO: 18525 - DNA, 21 bp, Homo sapiens
tgaggcctctytaatttacca

SEQ ID NO: 18526 - DNA, 21 bp, Homo sapiens
tctgactatawcatattccaa

SEQ ID NO: 18527 - DNA, 21 bp, Homo sapiens
actgcaaattsgttttatttt

SEQ ID NO: 18528 - DNA, 21 bp, Homo sapiens
aaaccaagcaygaagccccgt

SEQ ID NO: 18529 - DNA, 21 bp, Homo sapiens
gtatatagtgrccagagaact

SEQ ID NO: 18530 - DNA, 21 bp, Homo sapiens
acttttagctktttaagcact

SEQ ID NO: 18531 - DNA, 21 bp, Homo sapiens
atatttagtgstaatctacta

SEQ ID NO: 18532 - DNA, 21 bp, Homo sapiens
gccttttgctyctcggctaca

SEQ ID NO: 18533 - DNA, 21 bp, Homo sapiens
taggttctttytttagaatca

SEQ ID NO: 18534 - DNA, 21 bp, Homo sapiens
ttgcacttatytttcaggttc

SEQ ID NO: 18535 - DNA, 21 bp, Homo sapiens
ctctcacagcrtacctataag

SEQ ID NO: 18536 - DNA, 21 bp, Homo sapiens
aaagcataagrgttctacaag

SEQ ID NO: 18537 - DNA, 21 bp, Homo sapiens
taagaagcacrctcagatgca

SEQ ID NO: 18538 - DNA, 21 bp, Homo sapiens
attgaagcaamactgagaggc

SEQ ID NO: 18539 - DNA, 21 bp, Homo sapiens
acaggctgcaraataaaaacc

SEQ ID NO: 18540 - DNA, 21 bp, Homo sapiens
ccttagcagarggacatgtca

SEQ ID NO: 18541 - DNA, 21 bp, Homo sapiens
tattaacagcyacgatgaaat

SEQ ID NO: 18542 - DNA, 21 bp, Homo sapiens
taggtgaaagmctttgcatta

SEQ ID NO: 18543 - DNA, 21 bp, Homo sapiens
ctaatttttcrctgccactgt

SEQ ID NO: 18544 - DNA, 21 bp, Homo sapiens
tcttcttcttrgatgggaaaa

SEQ ID NO: 18545 - DNA, 21 bp, Homo sapiens
ttgcttacatratcatctggc

SEQ ID NO: 18546 - DNA, 21 bp, Homo sapiens
aaaaggctgtrcaaagaatgc

SEQ ID NO: 18547 - DNA, 21 bp, Homo sapiens
atcaattctcsccttcattta

SEQ ID NO: 18548 - DNA, 21 bp, Homo sapiens
aaagaggataygatccagatg

SEQ ID NO: 18549 - DNA, 21 bp, Homo sapiens
tttcagattamagttgacagc

SEQ ID NO: 18550 - DNA, 21 bp, Homo sapiens
atgaaaatatmtgggtgcact

SEQ ID NO: 18551 - DNA, 21 bp, Homo sapiens
agcatattttytaaaagcggc

SEQ ID NO: 18552 - DNA, 21 bp, Homo sapiens
ttcatctgtawgccacctaat

SEQ ID NO: 18553 - DNA, 21 bp, Homo sapiens
ttccatcaackgtagatgttt

SEQ ID NO: 18554 - DNA, 21 bp, Homo sapiens
tgaatgctagmgaacagcttc

SEQ ID NO: 18555 - DNA, 21 bp, Homo sapiens
agaagatttcrccaaccctac

SEQ ID NO: 18556 - DNA, 21 bp, Homo sapiens
atcacatgcaytgagttactg

SEQ ID NO: 18557 - DNA, 21 bp, Homo sapiens
atggcacatayattggttaac

SEQ ID NO: 18558 - DNA, 21 bp, Homo sapiens
gttcagctctrgaagccctca

SEQ ID NO: 18559 - DNA, 21 bp, Homo sapiens
tgttgttgccrctgtctacaa

SEQ ID NO: 18560 - DNA, 21 bp, Homo sapiens
agctgagatckggctgtctcc

SEQ ID NO: 18561 - DNA, 21 bp, Homo sapiens
acacaatcagstttgtaactg

SEQ ID NO: 18562 - DNA, 21 bp, Homo sapiens
aggcttaagcrcatttagtag

SEQ ID NO: 18563 - DNA, 21 bp, Homo sapiens
tcaccactgarctaataacta

SEQ ID NO: 18564 - DNA, 21 bp, Homo sapiens
aggagtttttmccacgtgctc

SEQ ID NO: 18565 - DNA, 21 bp, Homo sapiens
gcttcactaaragacatgtgt

SEQ ID NO: 18566 - DNA, 21 bp, Homo sapiens
gcccttgactrtcttaacatc

SEQ ID NO: 18567 - DNA, 21 bp, Homo sapiens
aggacccaggraactgatgct

SEQ ID NO: 18568 - DNA, 21 bp, Homo sapiens
aaggcagcacmgcttttatgc

SEQ ID NO: 18569 - DNA, 21 bp, Homo sapiens
tttcctctgcycaggttagct

SEQ ID NO: 18570 - DNA, 21 bp, Homo sapiens
taccagaggaycaactaaccc

SEQ ID NO: 18571 - DNA, 21 bp, Homo sapiens
ctgaatgaaamctggtgatca

SEQ ID NO: 18572 - DNA, 21 bp, Homo sapiens
aggctacaagktggtcaaacc

SEQ ID NO: 18573 - DNA, 21 bp, Homo sapiens
tcctataagascttggttttg

SEQ ID NO: 18574 - DNA, 21 bp, Homo sapiens
ctaacagtgaygttgccaatt

SEQ ID NO: 18575 - DNA, 21 bp, Homo sapiens
tgaagcgaaamtgagaaagag

SEQ ID NO: 18576 - DNA, 21 bp, Homo sapiens
accaggaagtwggcacaatcc

SEQ ID NO: 18577 - DNA, 21 bp, Homo sapiens
aacaatgtcgsattggagtaa

SEQ ID NO: 18578 - DNA, 21 bp, Homo sapiens
gtgaccgcatrggtaagggca

SEQ ID NO: 18579 - DNA, 21 bp, Homo sapiens
atgatggtgarcaaatgtgga

SEQ ID NO: 18580 - DNA, 21 bp, Homo sapiens
gccactttacmtttctatctt

SEQ ID NO: 18581 - DNA, 21 bp, Homo sapiens
ttcttgaagtwcctcatttaa

SEQ ID NO: 18582 - DNA, 21 bp, Homo sapiens
ctcataatagkcccaaactac

SEQ ID NO: 18583 - DNA, 21 bp, Homo sapiens
gcacttgtttrgatagcgtcc

SEQ ID NO: 18584 - DNA, 21 bp, Homo sapiens
tggcaatgttrtatggattag

SEQ ID NO: 18585 - DNA, 21 bp, Homo sapiens
ataaaagcacygcatttgaac

SEQ ID NO: 18586 - DNA, 21 bp, Homo sapiens
aacaataggawtagattagtg

SEQ ID NO: 18587 - DNA, 21 bp, Homo sapiens
aatgactcacwgaaatttgta

SEQ ID NO: 18588 - DNA, 21 bp, Homo sapiens
gggtctacctwtgtttcccaa

SEQ ID NO: 18589 - DNA, 21 bp, Homo sapiens
atattgagcaygttatcaggc

SEQ ID NO: 18590 - DNA, 21 bp, Homo sapiens
tagcataacaragggaacttt

SEQ ID NO: 18591 - DNA, 21 bp, Homo sapiens
atactttgcawcttacactat

SEQ ID NO: 18592 - DNA, 21 bp, Homo sapiens
tctgacaatgrtgtaagcttt

SEQ ID NO: 18593 - DNA, 21 bp, Homo sapiens
tgggagttackgtagattatg

SEQ ID NO: 18594 - DNA, 21 bp, Homo sapiens
ggggcatgtayggaagcgggt

SEQ ID NO: 18595 - DNA, 21 bp, Homo sapiens
aatttgctgcmatttgctgtt

SEQ ID NO: 18596 - DNA, 21 bp, Homo sapiens
caagcaaacargaaagtatat

SEQ ID NO: 18597 - DNA, 21 bp, Homo sapiens
tatatgaaaamaaattcaact

SEQ ID NO: 18598 - DNA, 21 bp, Homo sapiens
cttattgaaamtattagtagg

SEQ ID NO: 18599 - DNA, 21 bp, Homo sapiens
tatatggtacrcactgtgagc

SEQ ID NO: 18600 - DNA, 21 bp, Homo sapiens
gtggtggcctrgagatgaatt

SEQ ID NO: 18601 - DNA, 21 bp, Homo sapiens
gggaaataacygaggaaagca

SEQ ID NO: 18602 - DNA, 21 bp, Homo sapiens
aagccctgttycaacaaccca

SEQ ID NO: 18603 - DNA, 21 bp, Homo sapiens
cctcattgccyacagaaacga

SEQ ID NO: 18604 - DNA, 21 bp, Homo sapiens
gatgaagaacrctatggggaa

SEQ ID NO: 18605 - DNA, 21 bp, Homo sapiens
atggattttgrgctagaaact

SEQ ID NO: 18606 - DNA, 21 bp, Homo sapiens
gctgatttttwaaaaaaggct

SEQ ID NO: 18607 - DNA, 21 bp, Homo sapiens
aatctcacagrgttgtcatgg

SEQ ID NO: 18608 - DNA, 21 bp, Homo sapiens
ttgcagatgtytagttggcta

SEQ ID NO: 18609 - DNA, 21 bp, Homo sapiens
tcggcaacttkgagtagcaag

SEQ ID NO: 18610 - DNA, 21 bp, Homo sapiens
actatctgacstagagcaagt

SEQ ID NO: 18611 - DNA, 21 bp, Homo sapiens
catagtccacygtctttttag

SEQ ID NO: 18612 - DNA, 21 bp, Homo sapiens
aagaaattagrttttttttgc

SEQ ID NO: 18613 - DNA, 21 bp, Homo sapiens
ttgaaccatgrgtttgctatg

SEQ ID NO: 18614 - DNA, 21 bp, Homo sapiens
taccacttaayagtacatctc

SEQ ID NO: 18615 - DNA, 21 bp, Homo sapiens
tcatggaacamggctcctaga

SEQ ID NO: 18616 - DNA, 21 bp, Homo sapiens
aggtggaagtrtttttgtttc

SEQ ID NO: 18617 - DNA, 21 bp, Homo sapiens
aatggaagaayaggtcccata

SEQ ID NO: 18618 - DNA, 21 bp, Homo sapiens
gatgtttctarttacttttaa

SEQ ID NO: 18619 - DNA, 21 bp, Homo sapiens
ttgtaatcttwttgtctgatt

SEQ ID NO: 18620 - DNA, 21 bp, Homo sapiens
ggactcaggcsgactcaggca

SEQ ID NO: 18621 - DNA, 21 bp, Homo sapiens
atcttcataawctccaacctt

SEQ ID NO: 18622 - DNA, 21 bp, Homo sapiens
cttttaccatwcttcattaca

SEQ ID NO: 18623 - DNA, 21 bp, Homo sapiens
tctagtaaagygcaggccttg

SEQ ID NO: 18624 - DNA, 21 bp, Homo sapiens
ggcattacttragtgacaagt

SEQ ID NO: 18625 - DNA, 21 bp, Homo sapiens
atagcctctayagggtatttc

SEQ ID NO: 18626 - DNA, 21 bp, Homo sapiens
tgtgttgaaaygatgaggata

SEQ ID NO: 18627 - DNA, 21 bp, Homo sapiens
tctgtaaaatwgtatcagttg

SEQ ID NO: 18628 - DNA, 21 bp, Homo sapiens
gagataactgytgaggccttt

SEQ ID NO: 18629 - DNA, 21 bp, Homo sapiens
cacaaatgggwcagctaaaat

SEQ ID NO: 18630 - DNA, 21 bp, Homo sapiens
ttacccatccyggtaatcaga

SEQ ID NO: 18631 - DNA, 21 bp, Homo sapiens
tttcccctcaygttccagtag

SEQ ID NO: 18632 - DNA, 21 bp, Homo sapiens
tttaacttccrtagtgagagt

SEQ ID NO: 18633 - DNA, 21 bp, Homo sapiens
atggacttgcyaagctatgat

SEQ ID NO: 18634 - DNA, 21 bp, Homo sapiens
gcaccctaaawcatccaatag

SEQ ID NO: 18635 - DNA, 21 bp, Homo sapiens
gatggctggtyatagcttctt

SEQ ID NO: 18636 - DNA, 21 bp, Homo sapiens
attgtggtggrttcccatcca

SEQ ID NO: 18637 - DNA, 21 bp, Homo sapiens
aagatttaagrgcgaaacagg

SEQ ID NO: 18638 - DNA, 21 bp, Homo sapiens
ttcttctcatrcttttgatga

SEQ ID NO: 18639 - DNA, 21 bp, Homo sapiens
gctccagtgaytggccctttc

SEQ ID NO: 18640 - DNA, 21 bp, Homo sapiens
tctggctgctyaggatggcgc

SEQ ID NO: 18641 - DNA, 21 bp, Homo sapiens
attgaactcaygcatcccagt

SEQ ID NO: 18642 - DNA, 21 bp, Homo sapiens
caccatttagrgaagtatttt

SEQ ID NO: 18643 - DNA, 21 bp, Homo sapiens
gagacatcttsagctctgatt

SEQ ID NO: 18644 - DNA, 21 bp, Homo sapiens
caataaaaatsatttcagtgg

SEQ ID NO: 18645 - DNA, 21 bp, Homo sapiens
agtgtagactrcctttgaagc

SEQ ID NO: 18646 - DNA, 21 bp, Homo sapiens
gtcaaacaaasagattctgct

SEQ ID NO: 18647 - DNA, 21 bp, Homo sapiens
tttgattcaaytgtctggaac

SEQ ID NO: 18648 - DNA, 21 bp, Homo sapiens
ttaattacttyaaaaaactct

SEQ ID NO: 18649 - DNA, 21 bp, Homo sapiens
atcaacccaaygattcactag

SEQ ID NO: 18650 - DNA, 21 bp, Homo sapiens
atttctaggcrtgtaataata

SEQ ID NO: 18651 - DNA, 21 bp, Homo sapiens
ggaaccctcaratttaagatt

SEQ ID NO: 18652 - DNA, 21 bp, Homo sapiens
cctttgtgaartgattgtctt

SEQ ID NO: 18653 - DNA, 21 bp, Homo sapiens
cctatgaaatrctcacaccct

SEQ ID NO: 18654 - DNA, 21 bp, Homo sapiens
cactggagctkcagaaggaag

SEQ ID NO: 18655 - DNA, 21 bp, Homo sapiens
acccctgactygtagctctaa

SEQ ID NO: 18656 - DNA, 21 bp, Homo sapiens
tgtggcacaamgatttagtgg

SEQ ID NO: 18657 - DNA, 21 bp, Homo sapiens
tgaaacagggwgtgatttgct

SEQ ID NO: 18658 - DNA, 21 bp, Homo sapiens
ttattccactmttcagaaaca

SEQ ID NO: 18659 - DNA, 21 bp, Homo sapiens
gacatgtctaygttcattaac

SEQ ID NO: 18660 - DNA, 21 bp, Homo sapiens
tgttaaccttyggaaattttc

SEQ ID NO: 18661 - DNA, 21 bp, Homo sapiens
actgaaaatgygtgaagttca

SEQ ID NO: 18662 - DNA, 21 bp, Homo sapiens
tgactaattcwtatgataagg

SEQ ID NO: 18663 - DNA, 21 bp, Homo sapiens
ctatatttccstccaattcac

SEQ ID NO: 18664 - DNA, 21 bp, Homo sapiens
atgatagccakgcttactatt

SEQ ID NO: 18665 - DNA, 21 bp, Homo sapiens
taacaacacarttttaaatct

SEQ ID NO: 18666 - DNA, 21 bp, Homo sapiens
atatttttctsatagttgtcc

SEQ ID NO: 18667 - DNA, 21 bp, Homo sapiens
actcaaaatcytcaaagtttc

SEQ ID NO: 18668 - DNA, 21 bp, Homo sapiens
tggcccaaccratgctttctt

SEQ ID NO: 18669 - DNA, 21 bp, Homo sapiens
gaggatgaaaratgaatggca

SEQ ID NO: 18670 - DNA, 21 bp, Homo sapiens
ccaaatgtgaygatttaaatg

SEQ ID NO: 18671 - DNA, 21 bp, Homo sapiens
aagtatatgamaaatcttgaa

SEQ ID NO: 18672 - DNA, 21 bp, Homo sapiens
ggaatgcaccmaatccaaaca

SEQ ID NO: 18673 - DNA, 21 bp, Homo sapiens
cgggtattgtragaaggtatt

SEQ ID NO: 18674 - DNA, 21 bp, Homo sapiens
ctaattcttcscaaagtgtca

SEQ ID NO: 18675 - DNA, 21 bp, Homo sapiens
ctcatctctcrtttttgaaat

SEQ ID NO: 18676 - DNA, 21 bp, Homo sapiens
ggatcctattyggcaatcaaa

SEQ ID NO: 18677 - DNA, 21 bp, Homo sapiens
tcagaatagartggggtacaa

SEQ ID NO: 18678 - DNA, 21 bp, Homo sapiens
ccgggagccasggcccatagt

SEQ ID NO: 18679 - DNA, 21 bp, Homo sapiens
ggcagcacagstggagaccct

SEQ ID NO: 18680 - DNA, 21 bp, Homo sapiens
gacggggtccyggcctcagct

SEQ ID NO: 18681 - DNA, 21 bp, Homo sapiens
gtactctcacrcatgcaagct

SEQ ID NO: 18682 - DNA, 21 bp, Homo sapiens
aagagataggyggcatttgga

SEQ ID NO: 18683 - DNA, 21 bp, Homo sapiens
agttgcaagtrtgtttacacc

SEQ ID NO: 18684 - DNA, 21 bp, Homo sapiens
gagtgtgactrcattgcattc

SEQ ID NO: 18685 - DNA, 21 bp, Homo sapiens
cagctccgagsgctctcagag

SEQ ID NO: 18686 - DNA, 21 bp, Homo sapiens
cagaaccgtgwtccccttgtg

SEQ ID NO: 18687 - DNA, 21 bp, Homo sapiens
taaaatagggscccgttctgc

SEQ ID NO: 18688 - DNA, 21 bp, Homo sapiens
cacgttggackgcactcagtg

SEQ ID NO: 18689 - DNA, 21 bp, Homo sapiens
tatcaattgcrttatcctaaa

SEQ ID NO: 18690 - DNA, 21 bp, Homo sapiens
tcctcacctgstgctgagaat

SEQ ID NO: 18691 - DNA, 21 bp, Homo sapiens
ggtggccagartgaccatgac

SEQ ID NO: 18692 - DNA, 21 bp, Homo sapiens
ctgaaattggsatatcatctg

SEQ ID NO: 18693 - DNA, 21 bp, Homo sapiens
cccacccctckctctgcgtcc

SEQ ID NO: 18694 - DNA, 21 bp, Homo sapiens
ctataccctcrtaacatctgg

SEQ ID NO: 18695 - DNA, 21 bp, Homo sapiens
caacagcgcayggtatggata

SEQ ID NO: 18696 - DNA, 21 bp, Homo sapiens
gcgtgccctcygggagagaat

SEQ ID NO: 18697 - DNA, 21 bp, Homo sapiens
agcaagacccwatctcaaaca

SEQ ID NO: 18698 - DNA, 21 bp, Homo sapiens
acgggagtgtkaatcctaggc

SEQ ID NO: 18699 - DNA, 21 bp, Homo sapiens
agtgagttgargctcctcgat

SEQ ID NO: 18700 - DNA, 21 bp, Homo sapiens
tgtaaccctcratagattgcc

SEQ ID NO: 18701 - DNA, 21 bp, Homo sapiens
agacaggtacrttttaatgaa

SEQ ID NO: 18702 - DNA, 21 bp, Homo sapiens
tgcctgccttycacgcatagt

SEQ ID NO: 18703 - DNA, 21 bp, Homo sapiens
ttgggaaaccragcaactttt

SEQ ID NO: 18704 - DNA, 21 bp, Homo sapiens
gccctcttggraagtgggtac

SEQ ID NO: 18705 - DNA, 21 bp, Homo sapiens
gaacaggagcyggtggttggg

SEQ ID NO: 18706 - DNA, 21 bp, Homo sapiens
cttgaaggaakttttctgcca

SEQ ID NO: 18707 - DNA, 21 bp, Homo sapiens
acatgtgtggrccaccaagcg

SEQ ID NO: 18708 - DNA, 21 bp, Homo sapiens
gcccctctgtrtcaccctcta

SEQ ID NO: 18709 - DNA, 21 bp, Homo sapiens
tggttataagragttaatagc

SEQ ID NO: 18710 - DNA, 21 bp, Homo sapiens
cgcctggcttragggaccaag

SEQ ID NO: 18711 - DNA, 21 bp, Homo sapiens
tgtcttttgaygcataaccaa

SEQ ID NO: 18712 - DNA, 21 bp, Homo sapiens
acgtctatgcmagccacagct

SEQ ID NO: 18713 - DNA, 21 bp, Homo sapiens
cgagagagccygctggtctcc

SEQ ID NO: 18714 - DNA, 21 bp, Homo sapiens
attgtaaatcrggaatactta

SEQ ID NO: 18715 - DNA, 21 bp, Homo sapiens
gagcatagcartgagacttgg

SEQ ID NO: 18716 - DNA, 21 bp, Homo sapiens
cgggagggcargctacctctg

SEQ ID NO: 18717 - DNA, 21 bp, Homo sapiens
aagcgtttagyaaatgtttta

SEQ ID NO: 18718 - DNA, 21 bp, Homo sapiens
gagacagcacrggagataggc

SEQ ID NO: 18719 - DNA, 21 bp, Homo sapiens
ctagtcttccrtctaccctac

SEQ ID NO: 18720 - DNA, 21 bp, Homo sapiens
gggcagaaccsagtgaggctc

SEQ ID NO: 18721 - DNA, 21 bp, Homo sapiens
agatgagctgsagcaccggat

SEQ ID NO: 18722 - DNA, 21 bp, Homo sapiens
gtagtcaaagrgccttattta

SEQ ID NO: 18723 - DNA, 21 bp, Homo sapiens
aactcttcttsgggtcacttg

SEQ ID NO: 18724 - DNA, 21 bp, Homo sapiens
gatatccatayggtatttggt

SEQ ID NO: 18725 - DNA, 21 bp, Homo sapiens
tgccagggtgyaagcgtttgg

SEQ ID NO: 18726 - DNA, 21 bp, Homo sapiens
cttgctctctrtccatcgcac

SEQ ID NO: 18727 - DNA, 21 bp, Homo sapiens
cctaacaggcrtctctgatca

SEQ ID NO: 18728 - DNA, 21 bp, Homo sapiens
tggttatgcawattggaatgc

SEQ ID NO: 18729 - DNA, 21 bp, Homo sapiens
aagaacctggmaaccaagctg

SEQ ID NO: 18730 - DNA, 21 bp, Homo sapiens
acctcaggcaytttattgata

SEQ ID NO: 18731 - DNA, 21 bp, Homo sapiens
aaaatgaaagyagatatgtct

SEQ ID NO: 18732 - DNA, 21 bp, Homo sapiens
cattcttccawgtcctacttc

SEQ ID NO: 18733 - DNA, 21 bp, Homo sapiens
cttccacctgyggggattgag

SEQ ID NO: 18734 - DNA, 21 bp, Homo sapiens
acgatgctctraaacataaca

SEQ ID NO: 18735 - DNA, 21 bp, Homo sapiens
gactcagttcrctatcacctc

SEQ ID NO: 18736 - DNA, 21 bp, Homo sapiens
accatccctcrgtttgcacaa

SEQ ID NO: 18737 - DNA, 21 bp, Homo sapiens
ctggtagaggstctggcacat

SEQ ID NO: 18738 - DNA, 21 bp, Homo sapiens
ggatgaacttstttatataat

SEQ ID NO: 18739 - DNA, 21 bp, Homo sapiens
tagacatgtgratgcctgctt

SEQ ID NO: 18740 - DNA, 21 bp, Homo sapiens
gatggaactartggaatttct

SEQ ID NO: 18741 - DNA, 21 bp, Homo sapiens
gtctggaatastcttctctta

SEQ ID NO: 18742 - DNA, 21 bp, Homo sapiens
gcatttccttrtaaggctggg

SEQ ID NO: 18743 - DNA, 21 bp, Homo sapiens
ggattaggggractaggcttt

SEQ ID NO: 18744 - DNA, 21 bp, Homo sapiens
gtctggagaartagagaatcc

SEQ ID NO: 18745 - DNA, 21 bp, Homo sapiens
taatgaaggtycttttggctt

SEQ ID NO: 18746 - DNA, 21 bp, Homo sapiens
taaataaactmtacagtggaa

SEQ ID NO: 18747 - DNA, 21 bp, Homo sapiens
atgaggagatrtcgcaccatc

SEQ ID NO: 18748 - DNA, 21 bp, Homo sapiens
ggagtacttcrgaatcagccc

SEQ ID NO: 18749 - DNA, 21 bp, Homo sapiens
ggagcatggaytgcagcaggg

SEQ ID NO: 18750 - DNA, 21 bp, Homo sapiens
cgtggatggtkctgagataca

SEQ ID NO: 18751 - DNA, 21 bp, Homo sapiens
ctatagacatrggagttaaag

SEQ ID NO: 18752 - DNA, 21 bp, Homo sapiens
gcctagctccraggctgggcg

SEQ ID NO: 18753 - DNA, 21 bp, Homo sapiens
agtttgggccyaatattggtt

SEQ ID NO: 18754 - DNA, 21 bp, Homo sapiens
gtctctggctyggattttggt

SEQ ID NO: 18755 - DNA, 21 bp, Homo sapiens
tgtggaaattktaaacgtaaa

SEQ ID NO: 18756 - DNA, 21 bp, Homo sapiens
agtaaagaatyttggctgggc

SEQ ID NO: 18757 - DNA, 21 bp, Homo sapiens
catacaatagrtcttcagaaa

SEQ ID NO: 18758 - DNA, 21 bp, Homo sapiens
ccaaaaacccsaattatggtc

SEQ ID NO: 18759 - DNA, 21 bp, Homo sapiens
ctggaacaccrtctgtgctcc

SEQ ID NO: 18760 - DNA, 21 bp, Homo sapiens
aatgagggggkcctaactacc

SEQ ID NO: 18761 - DNA, 21 bp, Homo sapiens
tgggaacaccmtgtacacatt

SEQ ID NO: 18762 - DNA, 21 bp, Homo sapiens
tataggtggtwcagtttgttg

SEQ ID NO: 18763 - DNA, 21 bp, Homo sapiens
aaaacaactgrcatatattat

SEQ ID NO: 18764 - DNA, 21 bp, Homo sapiens
tttaccctttrcgaagcttgg

SEQ ID NO: 18765 - DNA, 21 bp, Homo sapiens
ctcatagagartcatttttct

SEQ ID NO: 18766 - DNA, 21 bp, Homo sapiens
ggcatttccaktattgatgtt

SEQ ID NO: 18767 - DNA, 21 bp, Homo sapiens
tttcctgttcwaatattttcc

SEQ ID NO: 18768 - DNA, 21 bp, Homo sapiens
cctctcctggraagctaggaa

SEQ ID NO: 18769 - DNA, 21 bp, Homo sapiens
gcttgatgaaygggccacact

SEQ ID NO: 18770 - DNA, 21 bp, Homo sapiens
atcctcgaggscaggaaatct

SEQ ID NO: 18771 - DNA, 21 bp, Homo sapiens
aagggacaggrttaagttgct

SEQ ID NO: 18772 - DNA, 21 bp, Homo sapiens
acgaaagccargcacatatga

SEQ ID NO: 18773 - DNA, 21 bp, Homo sapiens
agaagcttggygaagagaata

SEQ ID NO: 18774 - DNA, 21 bp, Homo sapiens
gtaatcaaggrgagtttggtt

SEQ ID NO: 18775 - DNA, 21 bp, Homo sapiens
aactactcggsaacggggaag

SEQ ID NO: 18776 - DNA, 21 bp, Homo sapiens
tactagccaaragtcagaaga

SEQ ID NO: 18777 - DNA, 21 bp, Homo sapiens
ctgcttggtarttaatggtgt

SEQ ID NO: 18778 - DNA, 21 bp, Homo sapiens
attcaatttaygtatttctat

SEQ ID NO: 18779 - DNA, 21 bp, Homo sapiens
cacctggggarttcctagcct

SEQ ID NO: 18780 - DNA, 21 bp, Homo sapiens
atattttattyaaccactgag

SEQ ID NO: 18781 - DNA, 21 bp, Homo sapiens
ttctccctttytctgttttcc

SEQ ID NO: 18782 - DNA, 21 bp, Homo sapiens
ataagctacayctaaccatat

SEQ ID NO: 18783 - DNA, 21 bp, Homo sapiens
cagttggaatmtactttctac

SEQ ID NO: 18784 - DNA, 21 bp, Homo sapiens
attagaaaagrtaattaaagt

SEQ ID NO: 18785 - DNA, 21 bp, Homo sapiens
gaagtgcagcyggtgggaaga

SEQ ID NO: 18786 - DNA, 21 bp, Homo sapiens
gttaacgacarattaactacc

SEQ ID NO: 18787 - DNA, 21 bp, Homo sapiens
aatatgtgttrtatgtttgat

SEQ ID NO: 18788 - DNA, 21 bp, Homo sapiens
cctaacatttrtgatttgtgt

SEQ ID NO: 18789 - DNA, 21 bp, Homo sapiens
attaaaaagtyttgatgctaa

SEQ ID NO: 18790 - DNA, 21 bp, Homo sapiens
ccataatcttyggtaagatag

SEQ ID NO: 18791 - DNA, 21 bp, Homo sapiens
tcaaggataasttcagggtat

SEQ ID NO: 18792 - DNA, 21 bp, Homo sapiens
attaaatctgstgaataaaat

SEQ ID NO: 18793 - DNA, 21 bp, Homo sapiens
ccacgctgttyggcctaggac

SEQ ID NO: 18794 - DNA, 21 bp, Homo sapiens
cgggtttagarcaaatcttct

SEQ ID NO: 18795 - DNA, 21 bp, Homo sapiens
atctccagcartgtttttgat

SEQ ID NO: 18796 - DNA, 21 bp, Homo sapiens
agtagcagaamctggattata

SEQ ID NO: 18797 - DNA, 21 bp, Homo sapiens
tggttctaccrttaaccaagt

SEQ ID NO: 18798 - DNA, 21 bp, Homo sapiens
aaatttccagytaatcaggat

SEQ ID NO: 18799 - DNA, 21 bp, Homo sapiens
tttcttttttsagcttccaac

SEQ ID NO: 18800 - DNA, 21 bp, Homo sapiens
ggcccagagarctgttctgga

SEQ ID NO: 18801 - DNA, 21 bp, Homo sapiens
tcaaaccataytacaaatatt

SEQ ID NO: 18802 - DNA, 21 bp, Homo sapiens
ttcagaggtgmctatccctaa

SEQ ID NO: 18803 - DNA, 21 bp, Homo sapiens
tgccctggtcyggcatagtta

SEQ ID NO: 18804 - DNA, 21 bp, Homo sapiens
agaactggagratacagtggt

SEQ ID NO: 18805 - DNA, 21 bp, Homo sapiens
tgtgaaagccrtgagcatgtg

SEQ ID NO: 18806 - DNA, 21 bp, Homo sapiens
gaaatctcagygtcaagattt

SEQ ID NO: 18807 - DNA, 21 bp, Homo sapiens
atcttcctttraacaacaaaa

SEQ ID NO: 18808 - DNA, 21 bp, Homo sapiens
aagagcacttrggacttttat

SEQ ID NO: 18809 - DNA, 21 bp, Homo sapiens
ttaaagtgaayagaaggtaaa

SEQ ID NO: 18810 - DNA, 21 bp, Homo sapiens
tgactagtgtrgtggtgctgt

SEQ ID NO: 18811 - DNA, 21 bp, Homo sapiens
tcttgtaagtytgaataagtt

SEQ ID NO: 18812 - DNA, 21 bp, Homo sapiens
tctgcatcccyctcgggctgt

SEQ ID NO: 18813 - DNA, 21 bp, Homo sapiens
gtctctctctytccctacaca

SEQ ID NO: 18814 - DNA, 21 bp, Homo sapiens
tgtgtcgaaakggaagcggtg

SEQ ID NO: 18815 - DNA, 21 bp, Homo sapiens
agaagcagagytgctggtagc

SEQ ID NO: 18816 - DNA, 21 bp, Homo sapiens
acagggacgcygaaggagccc

SEQ ID NO: 18817 - DNA, 21 bp, Homo sapiens
gggtgcatgtrgtaggagagg

SEQ ID NO: 18818 - DNA, 21 bp, Homo sapiens
agttatccatsgacaagagaa

SEQ ID NO: 18819 - DNA, 21 bp, Homo sapiens
gattttttgtrtgtgaaaatc

SEQ ID NO: 18820 - DNA, 21 bp, Homo sapiens
tctacctattytacttgatca

SEQ ID NO: 18821 - DNA, 21 bp, Homo sapiens
ttctctgcatkccactaggga

SEQ ID NO: 18822 - DNA, 21 bp, Homo sapiens
ataaatcaggyattcgaggca

SEQ ID NO: 18823 - DNA, 21 bp, Homo sapiens
agttcctgctragggaatctt

SEQ ID NO: 18824 - DNA, 21 bp, Homo sapiens
tgagaaaagcrtggaagagac

SEQ ID NO: 18825 - DNA, 21 bp, Homo sapiens
aagaagcaatytgtcattcct

SEQ ID NO: 18826 - DNA, 21 bp, Homo sapiens
ctgcttaaggrgaaatgatgt

SEQ ID NO: 18827 - DNA, 21 bp, Homo sapiens
catgtgatacratatcattgg

SEQ ID NO: 18828 - DNA, 21 bp, Homo sapiens
taccatatacratacttagga

SEQ ID NO: 18829 - DNA, 21 bp, Homo sapiens
agctaaacggmtattctgtta

SEQ ID NO: 18830 - DNA, 21 bp, Homo sapiens
ctttggtgttkattaaataca

SEQ ID NO: 18831 - DNA, 21 bp, Homo sapiens
attctttatcmctggaaaaca

SEQ ID NO: 18832 - DNA, 21 bp, Homo sapiens
tggcaaaaaamaaaaatccta

SEQ ID NO: 18833 - DNA, 21 bp, Homo sapiens
gtgctacatartggtgattct

SEQ ID NO: 18834 - DNA, 21 bp, Homo sapiens
gctaccattayggatgccctt

SEQ ID NO: 18835 - DNA, 21 bp, Homo sapiens
aatctaccaaygtatcaggct

SEQ ID NO: 18836 - DNA, 21 bp, Homo sapiens
aggaactgctyttctagggcc

SEQ ID NO: 18837 - DNA, 21 bp, Homo sapiens
ttagctcattrggaaagactt

SEQ ID NO: 18838 - DNA, 21 bp, Homo sapiens
agagagagacraaggaaggga

SEQ ID NO: 18839 - DNA, 21 bp, Homo sapiens
gaagagagcaytttttgtata

SEQ ID NO: 18840 - DNA, 21 bp, Homo sapiens
tagaaccaaaratgacagaaa

SEQ ID NO: 18841 - DNA, 21 bp, Homo sapiens
atacacaacakagcattttag

SEQ ID NO: 18842 - DNA, 21 bp, Homo sapiens
ggagatgcccrctgggcagaa

SEQ ID NO: 18843 - DNA, 21 bp, Homo sapiens
aaataatcaayttggaagatt

SEQ ID NO: 18844 - DNA, 21 bp, Homo sapiens
tgtgcttggcyttccttgcct

SEQ ID NO: 18845 - DNA, 21 bp, Homo sapiens
agaaaaataartaagagcagt

SEQ ID NO: 18846 - DNA, 21 bp, Homo sapiens
aatgaaagggraaaataaagc

SEQ ID NO: 18847 - DNA, 21 bp, Homo sapiens
cacactttacytttagaggat

SEQ ID NO: 18848 - DNA, 21 bp, Homo sapiens
attttggaagyctgaaagcac

SEQ ID NO: 18849 - DNA, 21 bp, Homo sapiens
tgatgtaactragcatgacaa

SEQ ID NO: 18850 - DNA, 21 bp, Homo sapiens
ttcaaaatgtrattagattac

SEQ ID NO: 18851 - DNA, 21 bp, Homo sapiens
cattatgctasagctgtttta

SEQ ID NO: 18852 - DNA, 21 bp, Homo sapiens
agagtgttaayagcagaccag

SEQ ID NO: 18853 - DNA, 21 bp, Homo sapiens
acttggagttycttctactct

SEQ ID NO: 18854 - DNA, 21 bp, Homo sapiens
gtagacccaasacactataac

SEQ ID NO: 18855 - DNA, 21 bp, Homo sapiens
gtatgacaagrttggaatttt

SEQ ID NO: 18856 - DNA, 21 bp, Homo sapiens
ctccttctatytatggtgcag

SEQ ID NO: 18857 - DNA, 21 bp, Homo sapiens
attttcttcayagtgtacaaa

SEQ ID NO: 18858 - DNA, 21 bp, Homo sapiens
caaaagctttwaagtcaatat

SEQ ID NO: 18859 - DNA, 21 bp, Homo sapiens
tggtaggaaawaaaatactat

SEQ ID NO: 18860 - DNA, 21 bp, Homo sapiens
gatatgataaytcatcataag

SEQ ID NO: 18861 - DNA, 21 bp, Homo sapiens
gtctattattyatatttttta

SEQ ID NO: 18862 - DNA, 21 bp, Homo sapiens
ttatctcctgwaaccctgttc

SEQ ID NO: 18863 - DNA, 21 bp, Homo sapiens
ccctggttggyccaattctgc

SEQ ID NO: 18864 - DNA, 21 bp, Homo sapiens
atgaggtaccwgatccttccc

SEQ ID NO: 18865 - DNA, 21 bp, Homo sapiens
ctgtgcttcgycttcaccttg

SEQ ID NO: 18866 - DNA, 21 bp, Homo sapiens
caatgctgccygctccctcag

SEQ ID NO: 18867 - DNA, 21 bp, Homo sapiens
tctggtgaccygacctggaca

SEQ ID NO: 18868 - DNA, 21 bp, Homo sapiens
cacttatagaygtgagtccct

SEQ ID NO: 18869 - DNA, 21 bp, Homo sapiens
caaaggaggcyaccattatcc

SEQ ID NO: 18870 - DNA, 21 bp, Homo sapiens
ctctactcaasaagttttttt

SEQ ID NO: 18871 - DNA, 21 bp, Homo sapiens
ttcttataacrtgtagcatgt

SEQ ID NO: 18872 - DNA, 21 bp, Homo sapiens
accttgagaastctgcattaa

SEQ ID NO: 18873 - DNA, 21 bp, Homo sapiens
ttacaatgttmagagagagag

SEQ ID NO: 18874 - DNA, 21 bp, Homo sapiens
tagaccctacragactactgg

SEQ ID NO: 18875 - DNA, 21 bp, Homo sapiens
ctttaagggtrtatgtttgaa

SEQ ID NO: 18876 - DNA, 21 bp, Homo sapiens
tgccctgtacmtctgaaaaat

SEQ ID NO: 18877 - DNA, 21 bp, Homo sapiens
acgtatgtagrttatgaatgg

SEQ ID NO: 18878 - DNA, 21 bp, Homo sapiens
tgattctccargttaatttca

SEQ ID NO: 18879 - DNA, 21 bp, Homo sapiens
tttgaccccargcatgtttct

SEQ ID NO: 18880 - DNA, 21 bp, Homo sapiens
ctaacacacayttatgcattc

SEQ ID NO: 18881 - DNA, 21 bp, Homo sapiens
agtacctgccyaataatgtat

SEQ ID NO: 18882 - DNA, 21 bp, Homo sapiens
aaatctggagyagagtgctgt

SEQ ID NO: 18883 - DNA, 21 bp, Homo sapiens
tgtttccgtcraaggcaaatt

SEQ ID NO: 18884 - DNA, 21 bp, Homo sapiens
tccgtgaagcrggccctcagc

SEQ ID NO: 18885 - DNA, 21 bp, Homo sapiens
aaattgcacaycacacaagta

SEQ ID NO: 18886 - DNA, 21 bp, Homo sapiens
acagggttttsttgcatagac

SEQ ID NO: 18887 - DNA, 21 bp, Homo sapiens
tgtgaaaagarcctactgttc

SEQ ID NO: 18888 - DNA, 21 bp, Homo sapiens
tttgaggcagrattttataaa

SEQ ID NO: 18889 - DNA, 21 bp, Homo sapiens
ttgtagaattrtgactagtct

SEQ ID NO: 18890 - DNA, 21 bp, Homo sapiens
cttaaaatggrtatttttact

SEQ ID NO: 18891 - DNA, 21 bp, Homo sapiens
atcctctgcasacaccttctc

SEQ ID NO: 18892 - DNA, 21 bp, Homo sapiens
aggtgatagcytgtgatatgc

SEQ ID NO: 18893 - DNA, 21 bp, Homo sapiens
aatctgtctgscacgcctgcc

SEQ ID NO: 18894 - DNA, 21 bp, Homo sapiens
tgcatgatatkgttgtttctc

SEQ ID NO: 18895 - DNA, 21 bp, Homo sapiens
cttagttagakaatttttttg

SEQ ID NO: 18896 - DNA, 21 bp, Homo sapiens
ctaagcagcartttttgaaaa

SEQ ID NO: 18897 - DNA, 21 bp, Homo sapiens
taatgcctttmagtgcagtta

SEQ ID NO: 18898 - DNA, 21 bp, Homo sapiens
gatattgtatygaagaagaac

SEQ ID NO: 18899 - DNA, 21 bp, Homo sapiens
gcttcaactgsaagtatatag

SEQ ID NO: 18900 - DNA, 21 bp, Homo sapiens
gatttggaaayactgatggcc

SEQ ID NO: 18901 - DNA, 21 bp, Homo sapiens
tatgccaaagycatctccaat

SEQ ID NO: 18902 - DNA, 21 bp, Homo sapiens
tgtagactatratatctacaa

SEQ ID NO: 18903 - DNA, 21 bp, Homo sapiens
acattgacaartaagcacttt

SEQ ID NO: 18904 - DNA, 21 bp, Homo sapiens
gcaatgcattrtaaaatactt

SEQ ID NO: 18905 - DNA, 21 bp, Homo sapiens
agtttgtgaaratacaatctg

SEQ ID NO: 18906 - DNA, 21 bp, Homo sapiens
tgccaaatcayctatactgat

SEQ ID NO: 18907 - DNA, 21 bp, Homo sapiens
ataactatcaytataactata

SEQ ID NO: 18908 - DNA, 21 bp, Homo sapiens
cactaagagasttctaagagt

SEQ ID NO: 18909 - DNA, 21 bp, Homo sapiens
tgaaaagcaaygtcagaatat

SEQ ID NO: 18910 - DNA, 21 bp, Homo sapiens
attacacaggwcattatactt

SEQ ID NO: 18911 - DNA, 21 bp, Homo sapiens
cagacctaaaytaaaggacca

SEQ ID NO: 18912 - DNA, 21 bp, Homo sapiens
cctttaaatgrtctattctac

SEQ ID NO: 18913 - DNA, 21 bp, Homo sapiens
ataattaaaasttatgtaagt

SEQ ID NO: 18914 - DNA, 21 bp, Homo sapiens
tgtattcatcytttatttctg

SEQ ID NO: 18915 - DNA, 21 bp, Homo sapiens
ttgaattttgygagtgttata

SEQ ID NO: 18916 - DNA, 21 bp, Homo sapiens
caagcagatamtgctcatttt

SEQ ID NO: 18917 - DNA, 21 bp, Homo sapiens
atgcagtgctyctaaaaatta

SEQ ID NO: 18918 - DNA, 21 bp, Homo sapiens
taaccattagkgttttaataa

SEQ ID NO: 18919 - DNA, 21 bp, Homo sapiens
tggaattttaycttaaaagat

SEQ ID NO: 18920 - DNA, 21 bp, Homo sapiens
atactttaaamagtttatatt

SEQ ID NO: 18921 - DNA, 21 bp, Homo sapiens
tacaagctttytacgtaaatg

SEQ ID NO: 18922 - DNA, 21 bp, Homo sapiens
aatagtatagrgaaatgaggt

SEQ ID NO: 18923 - DNA, 21 bp, Homo sapiens
tacattttcarcatttctgtg

SEQ ID NO: 18924 - DNA, 21 bp, Homo sapiens
tatttttactygttcctgttt

SEQ ID NO: 18925 - DNA, 21 bp, Homo sapiens
gagatagatcmatgtaggtaa

SEQ ID NO: 18926 - DNA, 21 bp, Homo sapiens
ttataaattcyaatgggtatt

SEQ ID NO: 18927 - DNA, 21 bp, Homo sapiens
ataagggagtyactttctagt

SEQ ID NO: 18928 - DNA, 21 bp, Homo sapiens
gtagtaccttyttgtttttaa

SEQ ID NO: 18929 - DNA, 21 bp, Homo sapiens
gggaaaggcckttatgtttct

SEQ ID NO: 18930 - DNA, 21 bp, Homo sapiens
agaaagtaagrttatctttga

SEQ ID NO: 18931 - DNA, 21 bp, Homo sapiens
caatagaagtygttgatcagt

SEQ ID NO: 18932 - DNA, 21 bp, Homo sapiens
actgaagtggytgagatccac

SEQ ID NO: 18933 - DNA, 21 bp, Homo sapiens
aaaagttttcmtttacaaaga

SEQ ID NO: 18934 - DNA, 21 bp, Homo sapiens
cagtgttccaktgagaggagc

SEQ ID NO: 18935 - DNA, 21 bp, Homo sapiens
tggtctcttayacttacttag

SEQ ID NO: 18936 - DNA, 21 bp, Homo sapiens
tgcatggtccmtatcagtact

SEQ ID NO: 18937 - DNA, 21 bp, Homo sapiens
tctcctaactkacaattcaaa

SEQ ID NO: 18938 - DNA, 21 bp, Homo sapiens
accctcatatmttgtttaaat

SEQ ID NO: 18939 - DNA, 21 bp, Homo sapiens
atattttgacwagaagcacag

SEQ ID NO: 18940 - DNA, 21 bp, Homo sapiens
tcccaactgcrctgtgtccat

SEQ ID NO: 18941 - DNA, 21 bp, Homo sapiens
aaatctcaaayattaagttgt

SEQ ID NO: 18942 - DNA, 21 bp, Homo sapiens
aggagttaggrggaatgaaat

SEQ ID NO: 18943 - DNA, 21 bp, Homo sapiens
ttaattattasagactacaca

SEQ ID NO: 18944 - DNA, 21 bp, Homo sapiens
atctatggtcwggaaattaag

SEQ ID NO: 18945 - DNA, 21 bp, Homo sapiens
atatggaaagrcccaagcact

SEQ ID NO: 18946 - DNA, 21 bp, Homo sapiens
taagtaatggmagagatgaga

SEQ ID NO: 18947 - DNA, 21 bp, Homo sapiens
aaggaatgggrtatataaatg

SEQ ID NO: 18948 - DNA, 21 bp, Homo sapiens
tagaatagatkcaaaaaaatc

SEQ ID NO: 18949 - DNA, 21 bp, Homo sapiens
agacaaggtargtggacatcc

SEQ ID NO: 18950 - DNA, 21 bp, Homo sapiens
aggacctttgytagaacacca

SEQ ID NO: 18951 - DNA, 21 bp, Homo sapiens
gaacatgacaygtattggaca

SEQ ID NO: 18952 - DNA, 21 bp, Homo sapiens
ggccatttatkgaaggcttgc

SEQ ID NO: 18953 - DNA, 21 bp, Homo sapiens
ggcagagaagytagaagtgtc

SEQ ID NO: 18954 - DNA, 21 bp, Homo sapiens
atgccaagttygtatttttct

SEQ ID NO: 18955 - DNA, 21 bp, Homo sapiens
cttttttcacytggtatctca

SEQ ID NO: 18956 - DNA, 21 bp, Homo sapiens
agataaaaagrcatccctcac

SEQ ID NO: 18957 - DNA, 21 bp, Homo sapiens
tatgcttggcwagagcagaga

SEQ ID NO: 18958 - DNA, 21 bp, Homo sapiens
gttaggtaagrtctaaatgaa

SEQ ID NO: 18959 - DNA, 21 bp, Homo sapiens
tgtcatggccrtaaaagtata

SEQ ID NO: 18960 - DNA, 21 bp, Homo sapiens
gggtaaatacstttttatgtc

SEQ ID NO: 18961 - DNA, 21 bp, Homo sapiens
tgagcaaagcrgagcttagat

SEQ ID NO: 18962 - DNA, 21 bp, Homo sapiens
gcgcctactaygtccctcatc

SEQ ID NO: 18963 - DNA, 21 bp, Homo sapiens
tagattaaatsacactaaatc

SEQ ID NO: 18964 - DNA, 21 bp, Homo sapiens
attaccaaaasgtaggcacca

SEQ ID NO: 18965 - DNA, 21 bp, Homo sapiens
tcccactgacwggagcaaaaa

SEQ ID NO: 18966 - DNA, 21 bp, Homo sapiens
cttaggtcttygcaagcagtc

SEQ ID NO: 18967 - DNA, 21 bp, Homo sapiens
aaattgctcaygggcttcagt

SEQ ID NO: 18968 - DNA, 21 bp, Homo sapiens
tcagagggccrcagaggaaga

SEQ ID NO: 18969 - DNA, 21 bp, Homo sapiens
ctaataacaayaaacagcaaa

SEQ ID NO: 18970 - DNA, 21 bp, Homo sapiens
tataatctacyaccatgataa

SEQ ID NO: 18971 - DNA, 21 bp, Homo sapiens
tgttcatattrctggattata

SEQ ID NO: 18972 - DNA, 21 bp, Homo sapiens
gcattatggastaacgttagc

SEQ ID NO: 18973 - DNA, 21 bp, Homo sapiens
gtcaactttgyaatttttgtt

SEQ ID NO: 18974 - DNA, 21 bp, Homo sapiens
agtccccacgycaacccgcat

SEQ ID NO: 18975 - DNA, 21 bp, Homo sapiens
caggaacaacrgtaacaaaaa

SEQ ID NO: 18976 - DNA, 21 bp, Homo sapiens
ctcccctttcygatccatccc

SEQ ID NO: 18977 - DNA, 21 bp, Homo sapiens
agttgggctgrgttgtccccc

SEQ ID NO: 18978 - DNA, 21 bp, Homo sapiens
gggagtacagraaggagacca

SEQ ID NO: 18979 - DNA, 21 bp, Homo sapiens
aaatttttttktgtgtttttc

SEQ ID NO: 18980 - DNA, 21 bp, Homo sapiens
cacaaatactrgtcttcaaag

SEQ ID NO: 18981 - DNA, 21 bp, Homo sapiens
gacagtaaccktaagttgttt

SEQ ID NO: 18982 - DNA, 21 bp, Homo sapiens
tgacagactgkttcccatatg

SEQ ID NO: 18983 - DNA, 21 bp, Homo sapiens
cacctaggttmgcttgatatg

SEQ ID NO: 18984 - DNA, 21 bp, Homo sapiens
ctcagacgaaygtgagtagca

SEQ ID NO: 18985 - DNA, 21 bp, Homo sapiens
ctctgctggaraagtgccctt

SEQ ID NO: 18986 - DNA, 21 bp, Homo sapiens
gaatgatgtgrcttagacaaa

SEQ ID NO: 18987 - DNA, 21 bp, Homo sapiens
atagatggcaracgcttagta

SEQ ID NO: 18988 - DNA, 21 bp, Homo sapiens
aacttgctctktttgacattt

SEQ ID NO: 18989 - DNA, 21 bp, Homo sapiens
gggatcttaarttctcaagcc

SEQ ID NO: 18990 - DNA, 21 bp, Homo sapiens
tgtcatggagracagccattg

SEQ ID NO: 18991 - DNA, 21 bp, Homo sapiens
aggagcttccygggcctgttt

SEQ ID NO: 18992 - DNA, 21 bp, Homo sapiens
agtgtaccagrctgcttcctg

SEQ ID NO: 18993 - DNA, 21 bp, Homo sapiens
aggaaaaatcsctatgtgtgt

SEQ ID NO: 18994 - DNA, 21 bp, Homo sapiens
ttgttcttccyagcatattca

SEQ ID NO: 18995 - DNA, 21 bp, Homo sapiens
ggttgaataamtatcaggaga

SEQ ID NO: 18996 - DNA, 21 bp, Homo sapiens
tgccttgggcrctcattctct

SEQ ID NO: 18997 - DNA, 21 bp, Homo sapiens
ttccttttaartactcagatg

SEQ ID NO: 18998 - DNA, 21 bp, Homo sapiens
ttaaagctccrtggatgggac

SEQ ID NO: 18999 - DNA, 21 bp, Homo sapiens
ggagattaatrtgcattctat

SEQ ID NO: 19000 - DNA, 21 bp, Homo sapiens
actagaagagstaactgtgga

SEQ ID NO: 19001 - DNA, 21 bp, Homo sapiens
gacagtgacgmgtttctagtt

SEQ ID NO: 19002 - DNA, 21 bp, Homo sapiens
taaaaatttcmtgatatttcc

SEQ ID NO: 19003 - DNA, 21 bp, Homo sapiens
cgagctgtgaygtcctaaaga

SEQ ID NO: 19004 - DNA, 21 bp, Homo sapiens
ctaaggttctygttaatgtgg

SEQ ID NO: 19005 - DNA, 21 bp, Homo sapiens
atttctgccasttgaactcta

SEQ ID NO: 19006 - DNA, 21 bp, Homo sapiens
aaagcaccacwtaaatctgta

SEQ ID NO: 19007 - DNA, 21 bp, Homo sapiens
acaatgaaacwcatattaaga

SEQ ID NO: 19008 - DNA, 21 bp, Homo sapiens
agtcacatcargaagttgtgg

SEQ ID NO: 19009 - DNA, 21 bp, Homo sapiens
tttctccattwtgctaattaa

SEQ ID NO: 19010 - DNA, 21 bp, Homo sapiens
aaaaactactrccaagatatt

SEQ ID NO: 19011 - DNA, 21 bp, Homo sapiens
caacttaaaakcattgaaatg

SEQ ID NO: 19012 - DNA, 21 bp, Homo sapiens
cttaactgcartgacctatat

SEQ ID NO: 19013 - DNA, 21 bp, Homo sapiens
tatttaattaytggaggttaa

SEQ ID NO: 19014 - DNA, 21 bp, Homo sapiens
ttaaagatcayctttctgtgt

SEQ ID NO: 19015 - DNA, 21 bp, Homo sapiens
actattattcyttatgtgata

SEQ ID NO: 19016 - DNA, 21 bp, Homo sapiens
aaaaccttgaycagatatttc

SEQ ID NO: 19017 - DNA, 21 bp, Homo sapiens
tgcaaatgatmaaattacaga

SEQ ID NO: 19018 - DNA, 21 bp, Homo sapiens
ttcagatgagktccagaagta

SEQ ID NO: 19019 - DNA, 21 bp, Homo sapiens
tagagctggarcactgtcatg

SEQ ID NO: 19020 - DNA, 21 bp, Homo sapiens
tctaattaaaractgaataca

SEQ ID NO: 19021 - DNA, 21 bp, Homo sapiens
caactttcgayttagtcacta

SEQ ID NO: 19022 - DNA, 21 bp, Homo sapiens
catttagaatsctggctgatg

SEQ ID NO: 19023 - DNA, 21 bp, Homo sapiens
tctctggttgrttggttctag

SEQ ID NO: 19024 - DNA, 21 bp, Homo sapiens
ataaaggagaygaagggggct

SEQ ID NO: 19025 - DNA, 21 bp, Homo sapiens
tagttcttcayggattcaacg

SEQ ID NO: 19026 - DNA, 21 bp, Homo sapiens
ttttgttggaycatcgcgtat

SEQ ID NO: 19027 - DNA, 21 bp, Homo sapiens
tttcacaagcrtgtaatctgg

SEQ ID NO: 19028 - DNA, 21 bp, Homo sapiens
cagaaaagccrcagggagtga

SEQ ID NO: 19029 - DNA, 21 bp, Homo sapiens
gaatgccacartaaccagcag

SEQ ID NO: 19030 - DNA, 21 bp, Homo sapiens
gtccctgacarcttcagtgta

SEQ ID NO: 19031 - DNA, 21 bp, Homo sapiens
cattccttagrccaacagtcc

SEQ ID NO: 19032 - DNA, 21 bp, Homo sapiens
tgtgaataaaygggctgacat

SEQ ID NO: 19033 - DNA, 21 bp, Homo sapiens
atagttgagayttgttatttg

SEQ ID NO: 19034 - DNA, 21 bp, Homo sapiens
gctctttactyaccaaacctc

SEQ ID NO: 19035 - DNA, 21 bp, Homo sapiens
ctacccaagcrtacagatgtt

SEQ ID NO: 19036 - DNA, 21 bp, Homo sapiens
ttcattgtctrcctaagatat

SEQ ID NO: 19037 - DNA, 21 bp, Homo sapiens
aaattctataygccttaacag

SEQ ID NO: 19038 - DNA, 21 bp, Homo sapiens
ctttaaatagsagacacaaag

SEQ ID NO: 19039 - DNA, 21 bp, Homo sapiens
aaatgataggrtgttctcttg

SEQ ID NO: 19040 - DNA, 21 bp, Homo sapiens
aatctgtataraaggatttgc

SEQ ID NO: 19041 - DNA, 21 bp, Homo sapiens
atgaagaatamaaccgcaaac

SEQ ID NO: 19042 - DNA, 21 bp, Homo sapiens
gttctccaaaygcacatgagg

SEQ ID NO: 19043 - DNA, 21 bp, Homo sapiens
taaaatgaacscttactctat

SEQ ID NO: 19044 - DNA, 21 bp, Homo sapiens
ataatttcatkactaatatga

SEQ ID NO: 19045 - DNA, 21 bp, Homo sapiens
ctgtaatgcakgtaaaggtgt

SEQ ID NO: 19046 - DNA, 21 bp, Homo sapiens
tgatctatttygatgaacccc

SEQ ID NO: 19047 - DNA, 21 bp, Homo sapiens
ggacgcacctkttcccttata

SEQ ID NO: 19048 - DNA, 21 bp, Homo sapiens
gcttcaaaacytgagctactg

SEQ ID NO: 19049 - DNA, 21 bp, Homo sapiens
caggtgaccayggtggctgga

SEQ ID NO: 19050 - DNA, 21 bp, Homo sapiens
aatgaccttasattatttact

SEQ ID NO: 19051 - DNA, 21 bp, Homo sapiens
agttaatgccrctgaaaatgg

SEQ ID NO: 19052 - DNA, 21 bp, Homo sapiens
gccaactgtcyttggtgtctt

SEQ ID NO: 19053 - DNA, 21 bp, Homo sapiens
taatcttcacsatcaaggtaa

SEQ ID NO: 19054 - DNA, 21 bp, Homo sapiens
ctaggaccgasagcaatgtag

SEQ ID NO: 19055 - DNA, 21 bp, Homo sapiens
ccaagaaaacrctgtaaaaat

SEQ ID NO: 19056 - DNA, 21 bp, Homo sapiens
acagtttaagsttcaataatt

SEQ ID NO: 19057 - DNA, 21 bp, Homo sapiens
tctgaccattrtgcttacagt

SEQ ID NO: 19058 - DNA, 21 bp, Homo sapiens
gaagcctcctstatgtggcac

SEQ ID NO: 19059 - DNA, 21 bp, Homo sapiens
ttcggccccayctttcctttg

SEQ ID NO: 19060 - DNA, 21 bp, Homo sapiens
ttatacctgtygatgactcag

SEQ ID NO: 19061 - DNA, 21 bp, Homo sapiens
atgaagtccargaattgtaaa

SEQ ID NO: 19062 - DNA, 21 bp, Homo sapiens
ggaacttcacygagaaaacgg

SEQ ID NO: 19063 - DNA, 21 bp, Homo sapiens
ttcagggtgaytttgaagtta

SEQ ID NO: 19064 - DNA, 21 bp, Homo sapiens
gcgtagaagtrgttcaagtaa

SEQ ID NO: 19065 - DNA, 21 bp, Homo sapiens
agacgcctaayatgagagata

SEQ ID NO: 19066 - DNA, 21 bp, Homo sapiens
tcctttatttrtcttgatgtc

SEQ ID NO: 19067 - DNA, 21 bp, Homo sapiens
ttctctgtccractgctcccc

SEQ ID NO: 19068 - DNA, 21 bp, Homo sapiens
ccctgaccctrctcactttag

SEQ ID NO: 19069 - DNA, 21 bp, Homo sapiens
agaaagatgtmcttatgtatt

SEQ ID NO: 19070 - DNA, 21 bp, Homo sapiens
tccttcccacrcctttcttca

SEQ ID NO: 19071 - DNA, 21 bp, Homo sapiens
aggcaacggargccctgtgct

SEQ ID NO: 19072 - DNA, 21 bp, Homo sapiens
ctcgatgcctyaatccacgtt

SEQ ID NO: 19073 - DNA, 21 bp, Homo sapiens
gaagcctctcrcggggtctgt

SEQ ID NO: 19074 - DNA, 21 bp, Homo sapiens
tgctggttcaycatgtgtgag

SEQ ID NO: 19075 - DNA, 21 bp, Homo sapiens
gcattctgagrggcatcgaat

SEQ ID NO: 19076 - DNA, 21 bp, Homo sapiens
gggcaaaaccrctgtgaaccc

SEQ ID NO: 19077 - DNA, 21 bp, Homo sapiens
tccattacgamcctgttcctc

SEQ ID NO: 19078 - DNA, 21 bp, Homo sapiens
gaattagtgcyacctattatg

SEQ ID NO: 19079 - DNA, 21 bp, Homo sapiens
agggtggtaaygaatatcaca

SEQ ID NO: 19080 - DNA, 21 bp, Homo sapiens
tgacagtcacrcagtctgctt

SEQ ID NO: 19081 - DNA, 21 bp, Homo sapiens
gagcaggagayaggcttggga

SEQ ID NO: 19082 - DNA, 21 bp, Homo sapiens
tctccatgtcrtattctcttc

SEQ ID NO: 19083 - DNA, 21 bp, Homo sapiens
ttcaccttgcrtgcttccctc

SEQ ID NO: 19084 - DNA, 21 bp, Homo sapiens
ttttctccctrtgtgtcacca

SEQ ID NO: 19085 - DNA, 21 bp, Homo sapiens
taccaaattgsgttgtaactg

SEQ ID NO: 19086 - DNA, 21 bp, Homo sapiens
gacaacagagkaggagtcaaa

SEQ ID NO: 19087 - DNA, 21 bp, Homo sapiens
aagtttggaayaccagcaaac

SEQ ID NO: 19088 - DNA, 21 bp, Homo sapiens
tgctttgtaayagtgcttctg

SEQ ID NO: 19089 - DNA, 21 bp, Homo sapiens
ttaccagagawgagaatttga

SEQ ID NO: 19090 - DNA, 21 bp, Homo sapiens
tttttcgaacsaaacctaact

SEQ ID NO: 19091 - DNA, 21 bp, Homo sapiens
aagttctcttygagttactac

SEQ ID NO: 19092 - DNA, 21 bp, Homo sapiens
atcaaactgaktgtgcatgat

SEQ ID NO: 19093 - DNA, 21 bp, Homo sapiens
tttagggcackcagaaaattt

SEQ ID NO: 19094 - DNA, 21 bp, Homo sapiens
tttaactgcartctgtggaag

SEQ ID NO: 19095 - DNA, 21 bp, Homo sapiens
attgagagccrctgtttccga

SEQ ID NO: 19096 - DNA, 21 bp, Homo sapiens
atggtgacacrtgaatcttct

SEQ ID NO: 19097 - DNA, 21 bp, Homo sapiens
gaaccaactamatggaatttg

SEQ ID NO: 19098 - DNA, 21 bp, Homo sapiens
gaatgaccatraacttcactt

SEQ ID NO: 19099 - DNA, 21 bp, Homo sapiens
gtgggtcaggwccatagattt

SEQ ID NO: 19100 - DNA, 21 bp, Homo sapiens
ctgtaatatcycaagaaatgc

SEQ ID NO: 19101 - DNA, 21 bp, Homo sapiens
tggaataatgrtaacagattg

SEQ ID NO: 19102 - DNA, 21 bp, Homo sapiens
taggcttatgktttctcagct

SEQ ID NO: 19103 - DNA, 21 bp, Homo sapiens
taagatttcayggatagggat

SEQ ID NO: 19104 - DNA, 21 bp, Homo sapiens
tcttttttctsctgctcctcc

SEQ ID NO: 19105 - DNA, 21 bp, Homo sapiens
gatttgggtayaaaatttcct

SEQ ID NO: 19106 - DNA, 21 bp, Homo sapiens
acagtgttttmattcccactt

SEQ ID NO: 19107 - DNA, 21 bp, Homo sapiens
ggacattaagkgtagatggaa

SEQ ID NO: 19108 - DNA, 21 bp, Homo sapiens
atcaaaccacmtctgcaacca

SEQ ID NO: 19109 - DNA, 21 bp, Homo sapiens
cttctgtattyctttctcatc

SEQ ID NO: 19110 - DNA, 21 bp, Homo sapiens
ccaccactgtrgatcattgcc

SEQ ID NO: 19111 - DNA, 21 bp, Homo sapiens
acttctgaggyacagattaaa

SEQ ID NO: 19112 - DNA, 21 bp, Homo sapiens
cacaaaaattwtcttgaaaga

SEQ ID NO: 19113 - DNA, 21 bp, Homo sapiens
aaattattttrttgagttctc

SEQ ID NO: 19114 - DNA, 21 bp, Homo sapiens
tcatgttttaratttatcctc

SEQ ID NO: 19115 - DNA, 21 bp, Homo sapiens
tctgccaagcraaccaaacac

SEQ ID NO: 19116 - DNA, 21 bp, Homo sapiens
tcatttggaaktcactgctta

SEQ ID NO: 19117 - DNA, 21 bp, Homo sapiens
caaccatgtamaaagctaatt

SEQ ID NO: 19118 - DNA, 21 bp, Homo sapiens
tgcaaatctgytgaatccctc

SEQ ID NO: 19119 - DNA, 21 bp, Homo sapiens
tatccatacarttggtgcaga

SEQ ID NO: 19120 - DNA, 21 bp, Homo sapiens
tataattaacyattttgaaaa

SEQ ID NO: 19121 - DNA, 21 bp, Homo sapiens
ttactgaaccratttacaaga

SEQ ID NO: 19122 - DNA, 21 bp, Homo sapiens
ttaggggaccytcatctagta

SEQ ID NO: 19123 - DNA, 21 bp, Homo sapiens
ccacccaaatmaccaagcaca

SEQ ID NO: 19124 - DNA, 21 bp, Homo sapiens
gaaagtgaaaygaattttact

SEQ ID NO: 19125 - DNA, 21 bp, Homo sapiens
agaaaatgtayagggatcctt

SEQ ID NO: 19126 - DNA, 21 bp, Homo sapiens
agaggttacgrctcactgcca

SEQ ID NO: 19127 - DNA, 21 bp, Homo sapiens
taggaagttamatattgaaaa

SEQ ID NO: 19128 - DNA, 21 bp, Homo sapiens
ttgcagccctygtgcctgttc

SEQ ID NO: 19129 - DNA, 21 bp, Homo sapiens
cctcgtgggarttcatgggaa

SEQ ID NO: 19130 - DNA, 21 bp, Homo sapiens
gacagcatcaragagggcagc

SEQ ID NO: 19131 - DNA, 21 bp, Homo sapiens
tcacaaaagaktcatgcaaaa

SEQ ID NO: 19132 - DNA, 21 bp, Homo sapiens
ccttcattatyccagaaacat

SEQ ID NO: 19133 - DNA, 21 bp, Homo sapiens
attctatctgrgtagaccagg

SEQ ID NO: 19134 - DNA, 21 bp, Homo sapiens
tgaagttaagragacaaaaaa

SEQ ID NO: 19135 - DNA, 21 bp, Homo sapiens
ttcaaggctayagtgagttga

SEQ ID NO: 19136 - DNA, 21 bp, Homo sapiens
aatggtgtagytgcttatgcc

SEQ ID NO: 19137 - DNA, 21 bp, Homo sapiens
agctatcctgrccttggcaag

SEQ ID NO: 19138 - DNA, 21 bp, Homo sapiens
ggtgcaatgtrggtcgagtgg

SEQ ID NO: 19139 - DNA, 21 bp, Homo sapiens
agagacattgygtcctttcta

SEQ ID NO: 19140 - DNA, 21 bp, Homo sapiens
tatatgcccgygaattctgac

SEQ ID NO: 19141 - DNA, 21 bp, Homo sapiens
atgatcctttrgtgccagcaa

SEQ ID NO: 19142 - DNA, 21 bp, Homo sapiens
taaaatatgasaaagaaaata

SEQ ID NO: 19143 - DNA, 21 bp, Homo sapiens
actatgcagaraaacaggtga

SEQ ID NO: 19144 - DNA, 21 bp, Homo sapiens
cattcagctgktcactccctt

SEQ ID NO: 19145 - DNA, 21 bp, Homo sapiens
taccacctcaygaaacccctt

SEQ ID NO: 19146 - DNA, 21 bp, Homo sapiens
atggctttgtygcaaatctag

SEQ ID NO: 19147 - DNA, 21 bp, Homo sapiens
aaagaagtctsaaaatattaa

SEQ ID NO: 19148 - DNA, 21 bp, Homo sapiens
aactttggctyaactgttgtc

SEQ ID NO: 19149 - DNA, 21 bp, Homo sapiens
cagggcaactrtagccttgta

SEQ ID NO: 19150 - DNA, 21 bp, Homo sapiens
tgtttagtgargctggcactt

SEQ ID NO: 19151 - DNA, 21 bp, Homo sapiens
ccctagaactrctaattctgg

SEQ ID NO: 19152 - DNA, 21 bp, Homo sapiens
aacaccagaasaacaacatgg

SEQ ID NO: 19153 - DNA, 21 bp, Homo sapiens
ggaagcagtgwaagaaggaag

SEQ ID NO: 19154 - DNA, 21 bp, Homo sapiens
ttaggacaggkgaactttgcc

SEQ ID NO: 19155 - DNA, 21 bp, Homo sapiens
catctctgaayagctgtccct

SEQ ID NO: 19156 - DNA, 21 bp, Homo sapiens
ttgacagcttyatactcattc

SEQ ID NO: 19157 - DNA, 21 bp, Homo sapiens
gctcatttttkcagccccgtc

SEQ ID NO: 19158 - DNA, 21 bp, Homo sapiens
cttgttaaacwttgctagagt

SEQ ID NO: 19159 - DNA, 21 bp, Homo sapiens
ttatgggatartgaccccaga

SEQ ID NO: 19160 - DNA, 21 bp, Homo sapiens
tatcttacctractaaagcac

SEQ ID NO: 19161 - DNA, 21 bp, Homo sapiens
tcacttgtccrtctgtccaac

SEQ ID NO: 19162 - DNA, 21 bp, Homo sapiens
ataatggtgcrgctgagattg

SEQ ID NO: 19163 - DNA, 21 bp, Homo sapiens
agcagacagtktctctttgta

SEQ ID NO: 19164 - DNA, 21 bp, Homo sapiens
aaaagtgtacrgagtaggctc

SEQ ID NO: 19165 - DNA, 21 bp, Homo sapiens
taaactaaggygatgaacaac

SEQ ID NO: 19166 - DNA, 21 bp, Homo sapiens
gagcattagtytcgaatccaa

SEQ ID NO: 19167 - DNA, 21 bp, Homo sapiens
gttaaggcccwgtctgaaatt

SEQ ID NO: 19168 - DNA, 21 bp, Homo sapiens
gaggtgtaaakaatgtgccta

SEQ ID NO: 19169 - DNA, 21 bp, Homo sapiens
ttgagccaagrtgagctctgt

SEQ ID NO: 19170 - DNA, 21 bp, Homo sapiens
aatcaggaacrgtaccagcga

SEQ ID NO: 19171 - DNA, 21 bp, Homo sapiens
aatcgcaggtrtcttatgaag

SEQ ID NO: 19172 - DNA, 21 bp, Homo sapiens
gaggttttctsttcagtctga

SEQ ID NO: 19173 - DNA, 21 bp, Homo sapiens
tcagactttgrggccaatggc

SEQ ID NO: 19174 - DNA, 21 bp, Homo sapiens
cacctgtgagwtactcgcacc

SEQ ID NO: 19175 - DNA, 21 bp, Homo sapiens
acaaaccatcrggaaagaact

SEQ ID NO: 19176 - DNA, 21 bp, Homo sapiens
atcagaaggcraaatgtttgg

SEQ ID NO: 19177 - DNA, 21 bp, Homo sapiens
tggaggctctraagcccgtgt

SEQ ID NO: 19178 - DNA, 21 bp, Homo sapiens
ctgttctgttytcatgtcaca

SEQ ID NO: 19179 - DNA, 21 bp, Homo sapiens
ttaattccggwtcagtcttag

SEQ ID NO: 19180 - DNA, 21 bp, Homo sapiens
cgtttcatacrttagctttaa

SEQ ID NO: 19181 - DNA, 21 bp, Homo sapiens
ccctgatgctycagtctgtgc

SEQ ID NO: 19182 - DNA, 21 bp, Homo sapiens
ttgttattttmagtggccatg

SEQ ID NO: 19183 - DNA, 21 bp, Homo sapiens
atgatatttargcacatggtt

SEQ ID NO: 19184 - DNA, 21 bp, Homo sapiens
gggatgcaggraaggagtgct

SEQ ID NO: 19185 - DNA, 21 bp, Homo sapiens
tgacctttaaracttctagac

SEQ ID NO: 19186 - DNA, 21 bp, Homo sapiens
aaatctgtaarcaccctagaa

SEQ ID NO: 19187 - DNA, 21 bp, Homo sapiens
caccccatagygctttgccca

SEQ ID NO: 19188 - DNA, 21 bp, Homo sapiens
atcactgtacrcctaaattct

SEQ ID NO: 19189 - DNA, 21 bp, Homo sapiens
atgacaatttwgtgtgagtca

SEQ ID NO: 19190 - DNA, 21 bp, Homo sapiens
accttcaaagrgcagccaaaa

SEQ ID NO: 19191 - DNA, 21 bp, Homo sapiens
gttagtggtarctatgaggca

SEQ ID NO: 19192 - DNA, 21 bp, Homo sapiens
gtgaggagggrtagttgttgg

SEQ ID NO: 19193 - DNA, 21 bp, Homo sapiens
ttcaggtggcyactcagctgg

SEQ ID NO: 19194 - DNA, 21 bp, Homo sapiens
gggtaaatgargtgatccttt

SEQ ID NO: 19195 - DNA, 21 bp, Homo sapiens
agcatgtatamagtatatctg

SEQ ID NO: 19196 - DNA, 21 bp, Homo sapiens
aggtgtcaatyagttgctatc

SEQ ID NO: 19197 - DNA, 21 bp, Homo sapiens
ataactgcacscttattttga

SEQ ID NO: 19198 - DNA, 21 bp, Homo sapiens
ataaatcctcrttgtgtgggc

SEQ ID NO: 19199 - DNA, 21 bp, Homo sapiens
tttttcaaagrttgtggaagc

SEQ ID NO: 19200 - DNA, 21 bp, Homo sapiens
aatcagtgtcsagcgtgtgta

SEQ ID NO: 19201 - DNA, 21 bp, Homo sapiens
agaggatggcygctacacaga

SEQ ID NO: 19202 - DNA, 21 bp, Homo sapiens
ttgtagcagcraagttagtga

SEQ ID NO: 19203 - DNA, 21 bp, Homo sapiens
ttttacaatgrtatatgaacg

SEQ ID NO: 19204 - DNA, 21 bp, Homo sapiens
tacgaaaatarcaagctggcc

SEQ ID NO: 19205 - DNA, 21 bp, Homo sapiens
gtgttgtcatytctattgaca

SEQ ID NO: 19206 - DNA, 21 bp, Homo sapiens
ctgaacctgtktttttataaa

SEQ ID NO: 19207 - DNA, 21 bp, Homo sapiens
ctcaagagaakcaaagtgtag

SEQ ID NO: 19208 - DNA, 21 bp, Homo sapiens
catgtaataargaaaaattgc

SEQ ID NO: 19209 - DNA, 21 bp, Homo sapiens
tcgtgagtacrgtgatgggtc

SEQ ID NO: 19210 - DNA, 21 bp, Homo sapiens
ttcttctactmtaccatattg

SEQ ID NO: 19211 - DNA, 21 bp, Homo sapiens
ctcctggcgcytgtttgcttt

SEQ ID NO: 19212 - DNA, 21 bp, Homo sapiens
tggtttgtagrccttgaacat

SEQ ID NO: 19213 - DNA, 21 bp, Homo sapiens
tcccaaggackcaggagctac

SEQ ID NO: 19214 - DNA, 21 bp, Homo sapiens
atgcatatttyaaaactctga

SEQ ID NO: 19215 - DNA, 21 bp, Homo sapiens
cagtttcagarggttacacca

SEQ ID NO: 19216 - DNA, 21 bp, Homo sapiens
tatttccccaratgtcatgga

SEQ ID NO: 19217 - DNA, 21 bp, Homo sapiens
tttttataagscttggatccc

SEQ ID NO: 19218 - DNA, 21 bp, Homo sapiens
tacaggtggcygcctcacagt

SEQ ID NO: 19219 - DNA, 21 bp, Homo sapiens
agaagctgacraaacatcagg

SEQ ID NO: 19220 - DNA, 21 bp, Homo sapiens
ggagttcttgrtatcgtattc

SEQ ID NO: 19221 - DNA, 21 bp, Homo sapiens
ctatggagttrtccggcagat

SEQ ID NO: 19222 - DNA, 21 bp, Homo sapiens
aagtagagctwtcacacaata

SEQ ID NO: 19223 - DNA, 21 bp, Homo sapiens
tcaatgaactraaatctgaag

SEQ ID NO: 19224 - DNA, 21 bp, Homo sapiens
tggtaaaaatrccaacaagtt

SEQ ID NO: 19225 - DNA, 21 bp, Homo sapiens
tgtacatatgyctattttgaa

SEQ ID NO: 19226 - DNA, 21 bp, Homo sapiens
agttatctaawttcactaggc

SEQ ID NO: 19227 - DNA, 21 bp, Homo sapiens
gaccctggagyggggcaccct

SEQ ID NO: 19228 - DNA, 21 bp, Homo sapiens
gcccagccacracataggtgc

SEQ ID NO: 19229 - DNA, 21 bp, Homo sapiens
cctggcactcragaaatatct

SEQ ID NO: 19230 - DNA, 21 bp, Homo sapiens
tcgcccgatgycctcctcctg

SEQ ID NO: 19231 - DNA, 21 bp, Homo sapiens
cgacaccacgragcgttactc

SEQ ID NO: 19232 - DNA, 21 bp, Homo sapiens
ttcacctacaraacaaccact

SEQ ID NO: 19233 - DNA, 21 bp, Homo sapiens
tgtcacttcckaagggagcag

SEQ ID NO: 19234 - DNA, 21 bp, Homo sapiens
cgtctgtagckttggaaaggt

SEQ ID NO: 19235 - DNA, 21 bp, Homo sapiens
ggacacctaaygggaaaaaca

SEQ ID NO: 19236 - DNA, 21 bp, Homo sapiens
aactgatcackgccttcagtc

SEQ ID NO: 19237 - DNA, 21 bp, Homo sapiens
gctatttggtwatagttgact

SEQ ID NO: 19238 - DNA, 21 bp, Homo sapiens
ggctagcatgygaactcttgc

SEQ ID NO: 19239 - DNA, 21 bp, Homo sapiens
ctcatcatgtstcagcgggcg

SEQ ID NO: 19240 - DNA, 21 bp, Homo sapiens
ttatgtctctwgtttatctta

SEQ ID NO: 19241 - DNA, 21 bp, Homo sapiens
gcatcatgatrgggtagaaat

SEQ ID NO: 19242 - DNA, 21 bp, Homo sapiens
cattggaccawattaaaatta

SEQ ID NO: 19243 - DNA, 21 bp, Homo sapiens
gctgcagttamagtaattgtg

SEQ ID NO: 19244 - DNA, 21 bp, Homo sapiens
gtgtatatcaragaaacacag

SEQ ID NO: 19245 - DNA, 21 bp, Homo sapiens
cgctctgttaygcacacacgt

SEQ ID NO: 19246 - DNA, 21 bp, Homo sapiens
tattctgaaastgatatgtgg

SEQ ID NO: 19247 - DNA, 21 bp, Homo sapiens
gtaatgtacgytcaaattgga

SEQ ID NO: 19248 - DNA, 21 bp, Homo sapiens
aaatgaggacragcacttact

SEQ ID NO: 19249 - DNA, 21 bp, Homo sapiens
cttagtccatsactttcatct

SEQ ID NO: 19250 - DNA, 21 bp, Homo sapiens
gatttaccatyaaatactgtt

SEQ ID NO: 19251 - DNA, 21 bp, Homo sapiens
tgagaatttcmagtgtgatcg

SEQ ID NO: 19252 - DNA, 21 bp, Homo sapiens
tggactctccracattccaga

SEQ ID NO: 19253 - DNA, 21 bp, Homo sapiens
cctgtgagggraggtcgaata

SEQ ID NO: 19254 - DNA, 21 bp, Homo sapiens
tgcatgttaarataaaagtaa

SEQ ID NO: 19255 - DNA, 21 bp, Homo sapiens
agaatctcacrtaaattaaat

SEQ ID NO: 19256 - DNA, 21 bp, Homo sapiens
aaaaactcacytgtgaatagt

SEQ ID NO: 19257 - DNA, 21 bp, Homo sapiens
agattatctgytttaaaatga

SEQ ID NO: 19258 - DNA, 21 bp, Homo sapiens
attctttgtargagcgttata

SEQ ID NO: 19259 - DNA, 21 bp, Homo sapiens
aattcttgtgsaattcactct

SEQ ID NO: 19260 - DNA, 21 bp, Homo sapiens
acagtgtgaasttcagtctaa

SEQ ID NO: 19261 - DNA, 21 bp, Homo sapiens
attctgccacrtaaatctcaa

SEQ ID NO: 19262 - DNA, 21 bp, Homo sapiens
aatcatgttaytgaactggca

SEQ ID NO: 19263 - DNA, 21 bp, Homo sapiens
ttaaaaaatgrtcaaaaacac

SEQ ID NO: 19264 - DNA, 21 bp, Homo sapiens
atagttggaakgagagttagt

SEQ ID NO: 19265 - DNA, 21 bp, Homo sapiens
gcagagtaacragtgccataa

SEQ ID NO: 19266 - DNA, 21 bp, Homo sapiens
ctaggaaaagwcaatgccact

SEQ ID NO: 19267 - DNA, 21 bp, Homo sapiens
gcaagaataarccttaatagc

SEQ ID NO: 19268 - DNA, 21 bp, Homo sapiens
ataatttcggyatgtgctgaa

SEQ ID NO: 19269 - DNA, 21 bp, Homo sapiens
tttttctcatycagttttcac

SEQ ID NO: 19270 - DNA, 21 bp, Homo sapiens
gcaaaagatcrtaagcgcatt

SEQ ID NO: 19271 - DNA, 21 bp, Homo sapiens
aaagtttctayaaaagttctc

SEQ ID NO: 19272 - DNA, 21 bp, Homo sapiens
catcacaaaawctatgaacta

SEQ ID NO: 19273 - DNA, 21 bp, Homo sapiens
ttaaaataaaygtgaaaagaa

SEQ ID NO: 19274 - DNA, 21 bp, Homo sapiens
gacttagtcamctgctaaaag

SEQ ID NO: 19275 - DNA, 21 bp, Homo sapiens
ctgaagcttayctccccacct

SEQ ID NO: 19276 - DNA, 21 bp, Homo sapiens
tttcccaggcytcccatatcc

SEQ ID NO: 19277 - DNA, 21 bp, Homo sapiens
tacaaacaaarctcaaaaata

SEQ ID NO: 19278 - DNA, 21 bp, Homo sapiens
aggtactttcrtagcatattt

SEQ ID NO: 19279 - DNA, 21 bp, Homo sapiens
cattggtccayagaaattata

SEQ ID NO: 19280 - DNA, 21 bp, Homo sapiens
tagataaagtygggctaacat

SEQ ID NO: 19281 - DNA, 21 bp, Homo sapiens
ccgtggaaacrccaaagacat

SEQ ID NO: 19282 - DNA, 21 bp, Homo sapiens
agtaataaacrtagttctaag

SEQ ID NO: 19283 - DNA, 21 bp, Homo sapiens
gcctttgcttkggctgtgaac

SEQ ID NO: 19284 - DNA, 21 bp, Homo sapiens
catacgtattmcaccatcttt

SEQ ID NO: 19285 - DNA, 21 bp, Homo sapiens
ttatggtggtkttaaatgcaa

SEQ ID NO: 19286 - DNA, 21 bp, Homo sapiens
gctagtatttktaacatacat

SEQ ID NO: 19287 - DNA, 21 bp, Homo sapiens
tcattttatawatgaagaaaa

SEQ ID NO: 19288 - DNA, 21 bp, Homo sapiens
tcaaagaatarataggaaata

SEQ ID NO: 19289 - DNA, 21 bp, Homo sapiens
ctgcctataargggaattgct

SEQ ID NO: 19290 - DNA, 21 bp, Homo sapiens
tataattataytggcaatagt

SEQ ID NO: 19291 - DNA, 21 bp, Homo sapiens
ttttgatttaygatattattg

SEQ ID NO: 19292 - DNA, 21 bp, Homo sapiens
tacggttgttrttccttgccc

SEQ ID NO: 19293 - DNA, 21 bp, Homo sapiens
ttcaactcaaygtgctttaac

SEQ ID NO: 19294 - DNA, 21 bp, Homo sapiens
tcttgaatgtrattgagccca

SEQ ID NO: 19295 - DNA, 21 bp, Homo sapiens
tttgtttttaktaagaatgag

SEQ ID NO: 19296 - DNA, 21 bp, Homo sapiens
tgtgctggctsggcaactctt

SEQ ID NO: 19297 - DNA, 21 bp, Homo sapiens
agtgcaacttsactctgtcta

SEQ ID NO: 19298 - DNA, 21 bp, Homo sapiens
cctgaagccastgtcagacaa

SEQ ID NO: 19299 - DNA, 21 bp, Homo sapiens
gttcttccagsccaggatggc

SEQ ID NO: 19300 - DNA, 21 bp, Homo sapiens
ctggcagataycttcagggag

SEQ ID NO: 19301 - DNA, 21 bp, Homo sapiens
ttgcctttatwgcatttatct

SEQ ID NO: 19302 - DNA, 21 bp, Homo sapiens
aacatgcatgmggacctgact

SEQ ID NO: 19303 - DNA, 21 bp, Homo sapiens
ggcatttcagkcacaacaaat

SEQ ID NO: 19304 - DNA, 21 bp, Homo sapiens
tacagacaatmatacaatgac

SEQ ID NO: 19305 - DNA, 21 bp, Homo sapiens
tagtcagtaarctcaccaatg

SEQ ID NO: 19306 - DNA, 21 bp, Homo sapiens
aatgctaagtratatgatgat

SEQ ID NO: 19307 - DNA, 21 bp, Homo sapiens
tcgctaacaawgtgatgggct

SEQ ID NO: 19308 - DNA, 21 bp, Homo sapiens
atgttctgagycccctgctta

SEQ ID NO: 19309 - DNA, 21 bp, Homo sapiens
atgaattagcrgttgtgaaaa

SEQ ID NO: 19310 - DNA, 21 bp, Homo sapiens
aaagagctgtsgaccccggac

SEQ ID NO: 19311 - DNA, 21 bp, Homo sapiens
ctttacaggcraagtccaccc

SEQ ID NO: 19312 - DNA, 21 bp, Homo sapiens
accagctaatmgtccatgtgt

SEQ ID NO: 19313 - DNA, 21 bp, Homo sapiens
gaactagaatrgcatcaatgg

SEQ ID NO: 19314 - DNA, 21 bp, Homo sapiens
tttgaaacagwagtcttcatt

SEQ ID NO: 19315 - DNA, 21 bp, Homo sapiens
acctcgggacratcttaacca

SEQ ID NO: 19316 - DNA, 21 bp, Homo sapiens
atttaaatttmagctgggttt

SEQ ID NO: 19317 - DNA, 21 bp, Homo sapiens
cttcctggtcrtttttgagca

SEQ ID NO: 19318 - DNA, 21 bp, Homo sapiens
tggtatttgayatgagcagaa

SEQ ID NO: 19319 - DNA, 21 bp, Homo sapiens
tcactagacaycagtctttct

SEQ ID NO: 19320 - DNA, 21 bp, Homo sapiens
ccaaagagaarggcattagta

SEQ ID NO: 19321 - DNA, 21 bp, Homo sapiens
cttaatcaccrcttctcaaaa

SEQ ID NO: 19322 - DNA, 21 bp, Homo sapiens
tgctattcccytggagtcacc

SEQ ID NO: 19323 - DNA, 21 bp, Homo sapiens
gtacaatgatratggacactt

SEQ ID NO: 19324 - DNA, 21 bp, Homo sapiens
gcctggatgcyacgttttgca

SEQ ID NO: 19325 - DNA, 21 bp, Homo sapiens
cagctgatcargctagtcagc

SEQ ID NO: 19326 - DNA, 21 bp, Homo sapiens
accaggaaatmtaaccactgt

SEQ ID NO: 19327 - DNA, 21 bp, Homo sapiens
gctcagaaaaygcaaagacct

SEQ ID NO: 19328 - DNA, 21 bp, Homo sapiens
tagtctgtctkcacagaaagc

SEQ ID NO: 19329 - DNA, 21 bp, Homo sapiens
tgcaatctggycttgctgact

SEQ ID NO: 19330 - DNA, 21 bp, Homo sapiens
gtaaacaggargagaatacaa

SEQ ID NO: 19331 - DNA, 21 bp, Homo sapiens
cagagcaaggyagaacaacgt

SEQ ID NO: 19332 - DNA, 21 bp, Homo sapiens
gatttagcagrgtaatttagt

SEQ ID NO: 19333 - DNA, 21 bp, Homo sapiens
tataaatcacrtacaaataaa

SEQ ID NO: 19334 - DNA, 21 bp, Homo sapiens
aaatattgaawaaatactcag

SEQ ID NO: 19335 - DNA, 21 bp, Homo sapiens
caaatcatccrcagacttgtt

SEQ ID NO: 19336 - DNA, 21 bp, Homo sapiens
taggaatttgytgcctcattg

SEQ ID NO: 19337 - DNA, 21 bp, Homo sapiens
aaaaaggtccktgtgttcaaa

SEQ ID NO: 19338 - DNA, 21 bp, Homo sapiens
ttatccttcaygatgcctgca

SEQ ID NO: 19339 - DNA, 21 bp, Homo sapiens
atctttagggygtctgtgcaa

SEQ ID NO: 19340 - DNA, 21 bp, Homo sapiens
gcttgaagatkcctggaaaag

SEQ ID NO: 19341 - DNA, 21 bp, Homo sapiens
atacttgttgraatccgagtt

SEQ ID NO: 19342 - DNA, 21 bp, Homo sapiens
cattttattaygaaaggaagg

SEQ ID NO: 19343 - DNA, 21 bp, Homo sapiens
caaacattagraatcaaaaca

SEQ ID NO: 19344 - DNA, 21 bp, Homo sapiens
ccaaaaatcaytcaaaaagat

SEQ ID NO: 19345 - DNA, 21 bp, Homo sapiens
aaaggaagagytgggattagc

SEQ ID NO: 19346 - DNA, 21 bp, Homo sapiens
tatggatcatstactgtgtgt

SEQ ID NO: 19347 - DNA, 21 bp, Homo sapiens
tacatatatarcatgcatttg

SEQ ID NO: 19348 - DNA, 21 bp, Homo sapiens
ttctgattccraaaagtaagt

SEQ ID NO: 19349 - DNA, 21 bp, Homo sapiens
tgtgtgatgcrtaagtaatag

SEQ ID NO: 19350 - DNA, 21 bp, Homo sapiens
agtcctcaccrtgaattacat

SEQ ID NO: 19351 - DNA, 21 bp, Homo sapiens
ttgtcaaggtsaaatgtgaaa

SEQ ID NO: 19352 - DNA, 21 bp, Homo sapiens
ccagccacacygcggatgctc

SEQ ID NO: 19353 - DNA, 21 bp, Homo sapiens
caccaattgtmtttctttatc

SEQ ID NO: 19354 - DNA, 21 bp, Homo sapiens
gggtggagtgygggtgttggt

SEQ ID NO: 19355 - DNA, 21 bp, Homo sapiens
gaggaggtaawgtaaagaata

SEQ ID NO: 19356 - DNA, 21 bp, Homo sapiens
attctgggagyttattggtca

SEQ ID NO: 19357 - DNA, 21 bp, Homo sapiens
tgtctaaaacragccctaccc

SEQ ID NO: 19358 - DNA, 21 bp, Homo sapiens
gatttggctaygagagctaga

SEQ ID NO: 19359 - DNA, 21 bp, Homo sapiens
caatcacggcrtagaggcagc

SEQ ID NO: 19360 - DNA, 21 bp, Homo sapiens
tatgaccagarcatgtttaat

SEQ ID NO: 19361 - DNA, 21 bp, Homo sapiens
atgggttaaamtctgcagtac

SEQ ID NO: 19362 - DNA, 21 bp, Homo sapiens
gccaggttctsttttcctaca

SEQ ID NO: 19363 - DNA, 21 bp, Homo sapiens
aaagaatctgmaaagaatagg

SEQ ID NO: 19364 - DNA, 21 bp, Homo sapiens
aggatagatawgataagagca

SEQ ID NO: 19365 - DNA, 21 bp, Homo sapiens
tgatggcgccrccctctccct

SEQ ID NO: 19366 - DNA, 21 bp, Homo sapiens
gtgtttcctgytgaggatata

SEQ ID NO: 19367 - DNA, 21 bp, Homo sapiens
tcttgccgtaytatctttggc

SEQ ID NO: 19368 - DNA, 21 bp, Homo sapiens
tattcaaaaasagaggctata

SEQ ID NO: 19369 - DNA, 21 bp, Homo sapiens
aaccattttcrtcagtctaat

SEQ ID NO: 19370 - DNA, 21 bp, Homo sapiens
aaggaaccaaraagcatgagg

SEQ ID NO: 19371 - DNA, 21 bp, Homo sapiens
tgaaacctttyaaatccaatg

SEQ ID NO: 19372 - DNA, 21 bp, Homo sapiens
aaaatagagtrcaatgatatg

SEQ ID NO: 19373 - DNA, 21 bp, Homo sapiens
aaatcatttayaaacttgtta

SEQ ID NO: 19374 - DNA, 21 bp, Homo sapiens
tataaacagaygttattataa

SEQ ID NO: 19375 - DNA, 21 bp, Homo sapiens
tactgccctcrgtgagctcaa

SEQ ID NO: 19376 - DNA, 21 bp, Homo sapiens
ttaattcatcyggccatggag

SEQ ID NO: 19377 - DNA, 21 bp, Homo sapiens
ggagaaaaatraataagttaa

SEQ ID NO: 19378 - DNA, 21 bp, Homo sapiens
tcatgttttakagaggactta

SEQ ID NO: 19379 - DNA, 21 bp, Homo sapiens
gtactaaccaygtgctgcttc

SEQ ID NO: 19380 - DNA, 21 bp, Homo sapiens
ggagaggaggsctcaacaatc

SEQ ID NO: 19381 - DNA, 21 bp, Homo sapiens
gcagtaactcraaactgccaa

SEQ ID NO: 19382 - DNA, 21 bp, Homo sapiens
ttaataaggtrcagcactttc

SEQ ID NO: 19383 - DNA, 21 bp, Homo sapiens
tacgttactcygtacaccctt

SEQ ID NO: 19384 - DNA, 21 bp, Homo sapiens
cttggtcagayaaagccgcaa

SEQ ID NO: 19385 - DNA, 21 bp, Homo sapiens
gcaagttgcgytggttcacag

SEQ ID NO: 19386 - DNA, 21 bp, Homo sapiens
ttatttgctaraagtattgat

SEQ ID NO: 19387 - DNA, 21 bp, Homo sapiens
tcatttcactyctataagaaa

SEQ ID NO: 19388 - DNA, 21 bp, Homo sapiens
gtcatccttasaaaacaatgt

SEQ ID NO: 19389 - DNA, 21 bp, Homo sapiens
ttgtacagtaragcagttaag

SEQ ID NO: 19390 - DNA, 21 bp, Homo sapiens
aaagccagtgrtctagagcag

SEQ ID NO: 19391 - DNA, 21 bp, Homo sapiens
tttcttgactstcattttctt

SEQ ID NO: 19392 - DNA, 21 bp, Homo sapiens
ggcagaattckaaacctgtgc

SEQ ID NO: 19393 - DNA, 21 bp, Homo sapiens
aatccttgacratgcctgaaa

SEQ ID NO: 19394 - DNA, 21 bp, Homo sapiens
tttttttttcrtagccattgg

SEQ ID NO: 19395 - DNA, 21 bp, Homo sapiens
tgacgcttttstttttcatat

SEQ ID NO: 19396 - DNA, 21 bp, Homo sapiens
gtcaatcaaamcactttatca

SEQ ID NO: 19397 - DNA, 21 bp, Homo sapiens
tcattaaaatkaagttatgct

SEQ ID NO: 19398 - DNA, 21 bp, Homo sapiens
atgagtatggrttcattgcaa

SEQ ID NO: 19399 - DNA, 21 bp, Homo sapiens
caagattagtytttgtttctt

SEQ ID NO: 19400 - DNA, 21 bp, Homo sapiens
gtacaagagcraaagagacca

SEQ ID NO: 19401 - DNA, 21 bp, Homo sapiens
aagcagagacmaagtcagcca

SEQ ID NO: 19402 - DNA, 21 bp, Homo sapiens
gatttttgtgsagttttttta

SEQ ID NO: 19403 - DNA, 21 bp, Homo sapiens
aagatattggmttttaatgac

SEQ ID NO: 19404 - DNA, 21 bp, Homo sapiens
ggatgaaataygtggaggaaa

SEQ ID NO: 19405 - DNA, 21 bp, Homo sapiens
aaacacctacmtgtcactata

SEQ ID NO: 19406 - DNA, 21 bp, Homo sapiens
ccatgtgattrttgtaacagt

SEQ ID NO: 19407 - DNA, 21 bp, Homo sapiens
cagaacagagyatttggtact

SEQ ID NO: 19408 - DNA, 21 bp, Homo sapiens
tgaggaagttkcaaatgtgcc

SEQ ID NO: 19409 - DNA, 21 bp, Homo sapiens
tctacatgctyaggaggttgt

SEQ ID NO: 19410 - DNA, 21 bp, Homo sapiens
ttaataataayaagctctgat

SEQ ID NO: 19411 - DNA, 21 bp, Homo sapiens
gttttttgcayatgtaaatgg

SEQ ID NO: 19412 - DNA, 21 bp, Homo sapiens
atcttgcttgwattccatact

SEQ ID NO: 19413 - DNA, 21 bp, Homo sapiens
atagacaataktatctgagac

SEQ ID NO: 19414 - DNA, 21 bp, Homo sapiens
tggaggatacytgagatactt

SEQ ID NO: 19415 - DNA, 21 bp, Homo sapiens
tggactagcawccctctttag

SEQ ID NO: 19416 - DNA, 21 bp, Homo sapiens
caaataatatrtgcagagatt

SEQ ID NO: 19417 - DNA, 21 bp, Homo sapiens
cagttgagtcsctttcctcta

SEQ ID NO: 19418 - DNA, 21 bp, Homo sapiens
cagggtcacaygggatgagaa

SEQ ID NO: 19419 - DNA, 21 bp, Homo sapiens
atatgatgatytttccccaga

SEQ ID NO: 19420 - DNA, 21 bp, Homo sapiens
taaaatactayagcatttgag

SEQ ID NO: 19421 - DNA, 21 bp, Homo sapiens
atatttcctcytgtggctttg

SEQ ID NO: 19422 - DNA, 21 bp, Homo sapiens
gcaatgtcctrgagtaagtgt

SEQ ID NO: 19423 - DNA, 21 bp, Homo sapiens
gttaatgtacyggctgtgcac

SEQ ID NO: 19424 - DNA, 21 bp, Homo sapiens
agcattattartctttgtttt

SEQ ID NO: 19425 - DNA, 21 bp, Homo sapiens
agtttcaaaawcacaattcat

SEQ ID NO: 19426 - DNA, 21 bp, Homo sapiens
gaagaaactcytaagatgcaa

SEQ ID NO: 19427 - DNA, 21 bp, Homo sapiens
aaaattaattktcaagccaaa

SEQ ID NO: 19428 - DNA, 21 bp, Homo sapiens
tgctgaaagayggaagatgca

SEQ ID NO: 19429 - DNA, 21 bp, Homo sapiens
gctgtcagatwtgaggagagc

SEQ ID NO: 19430 - DNA, 21 bp, Homo sapiens
ttaggcctggyggaaatattt

SEQ ID NO: 19431 - DNA, 21 bp, Homo sapiens
taagccacaaygggaaaagtt

SEQ ID NO: 19432 - DNA, 21 bp, Homo sapiens
ctcatacaggsagtcagaaga

SEQ ID NO: 19433 - DNA, 21 bp, Homo sapiens
tttgagggagmgctttcaggg

SEQ ID NO: 19434 - DNA, 21 bp, Homo sapiens
tctttactgaytcctcctctg

SEQ ID NO: 19435 - DNA, 21 bp, Homo sapiens
gaataaaggarattattttag

SEQ ID NO: 19436 - DNA, 21 bp, Homo sapiens
tccatttctgwcttgcagttc

SEQ ID NO: 19437 - DNA, 21 bp, Homo sapiens
gatctcatccsgagaaaatac

SEQ ID NO: 19438 - DNA, 21 bp, Homo sapiens
caccataactycaagcttgat

SEQ ID NO: 19439 - DNA, 21 bp, Homo sapiens
gtatggtttargtgaatgcca

SEQ ID NO: 19440 - DNA, 21 bp, Homo sapiens
atagagcttasaagaatttta

SEQ ID NO: 19441 - DNA, 21 bp, Homo sapiens
tctaagagctygaaatgacta

SEQ ID NO: 19442 - DNA, 21 bp, Homo sapiens
tcctcaaattmtgctttcttg

SEQ ID NO: 19443 - DNA, 21 bp, Homo sapiens
ggcaggttcarcagagcaggc

SEQ ID NO: 19444 - DNA, 21 bp, Homo sapiens
ctaggatgagraaagtaggaa

SEQ ID NO: 19445 - DNA, 21 bp, Homo sapiens
cgagagattarggtcgactgg

SEQ ID NO: 19446 - DNA, 21 bp, Homo sapiens
atttgagccayatcctgacaa

SEQ ID NO: 19447 - DNA, 21 bp, Homo sapiens
ctgtttggggyggtgcatgga

SEQ ID NO: 19448 - DNA, 21 bp, Homo sapiens
ctctgccatgwcctagagaca

SEQ ID NO: 19449 - DNA, 21 bp, Homo sapiens
tggggttgtawtttgtatatt

SEQ ID NO: 19450 - DNA, 21 bp, Homo sapiens
aatcatttaartaaaagtggt

SEQ ID NO: 19451 - DNA, 21 bp, Homo sapiens
tacttacattkgttttcaaag

SEQ ID NO: 19452 - DNA, 21 bp, Homo sapiens
gcaagaacttrtattcaactt

SEQ ID NO: 19453 - DNA, 21 bp, Homo sapiens
tcaaagaaacmgtaacttttt

SEQ ID NO: 19454 - DNA, 21 bp, Homo sapiens
catcataggamagaaagagtt

SEQ ID NO: 19455 - DNA, 21 bp, Homo sapiens
ggtaaatcatrgttcccatga

SEQ ID NO: 19456 - DNA, 21 bp, Homo sapiens
cctctcatacmactctccttc

SEQ ID NO: 19457 - DNA, 21 bp, Homo sapiens
gcaccaatctyatgtagtggt

SEQ ID NO: 19458 - DNA, 21 bp, Homo sapiens
atgttttgtcscaaggtgtag

SEQ ID NO: 19459 - DNA, 21 bp, Homo sapiens
ccctgtgagckgcactcatct

SEQ ID NO: 19460 - DNA, 21 bp, Homo sapiens
tctgagacctyttcctctcat

SEQ ID NO: 19461 - DNA, 21 bp, Homo sapiens
aggcatgatgrtacttctatc

SEQ ID NO: 19462 - DNA, 21 bp, Homo sapiens
catgtttaccrgatgcaagat

SEQ ID NO: 19463 - DNA, 21 bp, Homo sapiens
tctgtgcaaarcttctaggag

SEQ ID NO: 19464 - DNA, 21 bp, Homo sapiens
tatgcttcacrtattgacaca

SEQ ID NO: 19465 - DNA, 21 bp, Homo sapiens
gtcagtattgycagtacaagt

SEQ ID NO: 19466 - DNA, 21 bp, Homo sapiens
atgtaactgamtgatcttttg

SEQ ID NO: 19467 - DNA, 21 bp, Homo sapiens
cacaaagctayaactgcttca

SEQ ID NO: 19468 - DNA, 21 bp, Homo sapiens
aaactggtaaycagacaaagc

SEQ ID NO: 19469 - DNA, 21 bp, Homo sapiens
agaggaagtayctggaggtga

SEQ ID NO: 19470 - DNA, 21 bp, Homo sapiens
ccccacttttrtgtaagacac

SEQ ID NO: 19471 - DNA, 21 bp, Homo sapiens
tggggaggctsttgatggcat

SEQ ID NO: 19472 - DNA, 21 bp, Homo sapiens
taattgtatckaatctaaaat

SEQ ID NO: 19473 - DNA, 21 bp, Homo sapiens
tcacttcagtyggggaaatca

SEQ ID NO: 19474 - DNA, 21 bp, Homo sapiens
ggaagaacagsaaagactgtt

SEQ ID NO: 19475 - DNA, 21 bp, Homo sapiens
tctttccacartttcaaatga

SEQ ID NO: 19476 - DNA, 21 bp, Homo sapiens
cagccttaggsaagatacatg

SEQ ID NO: 19477 - DNA, 21 bp, Homo sapiens
tttatatattsaagtactggt

SEQ ID NO: 19478 - DNA, 21 bp, Homo sapiens
cttacatacarcaagaaaaat

SEQ ID NO: 19479 - DNA, 21 bp, Homo sapiens
agcctgatgcytagtagacga

SEQ ID NO: 19480 - DNA, 21 bp, Homo sapiens
gcatctgattrttttcaagtt

SEQ ID NO: 19481 - DNA, 21 bp, Homo sapiens
aatgtgtaatsaaaggtcaga

SEQ ID NO: 19482 - DNA, 21 bp, Homo sapiens
ttttttgacayagggagtaaa

SEQ ID NO: 19483 - DNA, 21 bp, Homo sapiens
atactgtcagytgaaaatgca

SEQ ID NO: 19484 - DNA, 21 bp, Homo sapiens
aatttattcamctgtgccata

SEQ ID NO: 19485 - DNA, 21 bp, Homo sapiens
tcttgagaggyggccttgcaa

SEQ ID NO: 19486 - DNA, 21 bp, Homo sapiens
tgtttaactgmaggcagagag

SEQ ID NO: 19487 - DNA, 21 bp, Homo sapiens
atggtttaaastttgggaatc

SEQ ID NO: 19488 - DNA, 21 bp, Homo sapiens
tcactaaaaayccatggtagc

SEQ ID NO: 19489 - DNA, 21 bp, Homo sapiens
aaagaaaaatrtagtcctgtt

SEQ ID NO: 19490 - DNA, 21 bp, Homo sapiens
ctaattccagkactctaatat

SEQ ID NO: 19491 - DNA, 21 bp, Homo sapiens
tttgggtgaaytctcttttct

SEQ ID NO: 19492 - DNA, 21 bp, Homo sapiens
agagataatargcagttgaga

SEQ ID NO: 19493 - DNA, 21 bp, Homo sapiens
gacagtaaacrtaactccaaa

SEQ ID NO: 19494 - DNA, 21 bp, Homo sapiens
gggaagcagtytgttttccaa

SEQ ID NO: 19495 - DNA, 21 bp, Homo sapiens
aaataaaccartaacagaaac

SEQ ID NO: 19496 - DNA, 21 bp, Homo sapiens
ggtataagaakctcaagagga

SEQ ID NO: 19497 - DNA, 21 bp, Homo sapiens
cgaagcaaacrtaactcattt

SEQ ID NO: 19498 - DNA, 21 bp, Homo sapiens
ataaaattagytcacaaagac

SEQ ID NO: 19499 - DNA, 21 bp, Homo sapiens
gacacacagcrtgcacttact

SEQ ID NO: 19500 - DNA, 21 bp, Homo sapiens
tatttgcaacstggtataaat

SEQ ID NO: 19501 - DNA, 21 bp, Homo sapiens
agacctttgarcaacaacttg

SEQ ID NO: 19502 - DNA, 21 bp, Homo sapiens
atctgaagctrtgaaggactg

SEQ ID NO: 19503 - DNA, 21 bp, Homo sapiens
ttcacatgcarttgtcgattc

SEQ ID NO: 19504 - DNA, 21 bp, Homo sapiens
actgatggacwatgctcacaa

SEQ ID NO: 19505 - DNA, 21 bp, Homo sapiens
cattgaacatytgtaagaact

SEQ ID NO: 19506 - DNA, 21 bp, Homo sapiens
gttaagagaakaaggtggaag

SEQ ID NO: 19507 - DNA, 21 bp, Homo sapiens
atattgacatsctgagacatg

SEQ ID NO: 19508 - DNA, 21 bp, Homo sapiens
ttgcttttggrttaaaagaaa

SEQ ID NO: 19509 - DNA, 21 bp, Homo sapiens
aagcatactayagtgccagca

SEQ ID NO: 19510 - DNA, 21 bp, Homo sapiens
aaataggcaawcctgggttaa

SEQ ID NO: 19511 - DNA, 21 bp, Homo sapiens
ttttaagattmaatgacttac

SEQ ID NO: 19512 - DNA, 21 bp, Homo sapiens
caagacctttrttattgaatc

SEQ ID NO: 19513 - DNA, 21 bp, Homo sapiens
attgctacatycataccagtc

SEQ ID NO: 19514 - DNA, 21 bp, Homo sapiens
ctgactcatastgttcaaagt

SEQ ID NO: 19515 - DNA, 21 bp, Homo sapiens
agcagctacgmtctgctcaga

SEQ ID NO: 19516 - DNA, 21 bp, Homo sapiens
acatgcaatawaagagaactt

SEQ ID NO: 19517 - DNA, 21 bp, Homo sapiens
atataaaaatktaagaagcat

SEQ ID NO: 19518 - DNA, 21 bp, Homo sapiens
aggcaggacawgaaggctacc

SEQ ID NO: 19519 - DNA, 21 bp, Homo sapiens
actgtatttgmaagaagcttt

SEQ ID NO: 19520 - DNA, 21 bp, Homo sapiens
gtgccttataytgttttttaa

SEQ ID NO: 19521 - DNA, 21 bp, Homo sapiens
gtcttgtagamgaaaggtttt

SEQ ID NO: 19522 - DNA, 21 bp, Homo sapiens
cagagtttgayggcaggttta

SEQ ID NO: 19523 - DNA, 21 bp, Homo sapiens
aatgtcatgtytccacctggc

SEQ ID NO: 19524 - DNA, 21 bp, Homo sapiens
tcagcaaaacrtctcagaaat

SEQ ID NO: 19525 - DNA, 21 bp, Homo sapiens
aacagagctcrtgacagaaat

SEQ ID NO: 19526 - DNA, 21 bp, Homo sapiens
actgaaaaatyaaattatctg

SEQ ID NO: 19527 - DNA, 21 bp, Homo sapiens
tgcacaagctyatgtctcagt

SEQ ID NO: 19528 - DNA, 21 bp, Homo sapiens
gtctcacttcrgctgaactac

SEQ ID NO: 19529 - DNA, 21 bp, Homo sapiens
accaggcgtgrtgttctcata

SEQ ID NO: 19530 - DNA, 21 bp, Homo sapiens
gcctccagcaragaagctaag

SEQ ID NO: 19531 - DNA, 21 bp, Homo sapiens
ttcacaattayatttttgttg

SEQ ID NO: 19532 - DNA, 21 bp, Homo sapiens
gataaatcaakctgtctgtat

SEQ ID NO: 19533 - DNA, 21 bp, Homo sapiens
tcacaatcctytttcttaaat

SEQ ID NO: 19534 - DNA, 21 bp, Homo sapiens
cctgaaattayttagactggc

SEQ ID NO: 19535 - DNA, 21 bp, Homo sapiens
aagaattagarttcagcttta

SEQ ID NO: 19536 - DNA, 21 bp, Homo sapiens
tcttttcaagyataaaataat

SEQ ID NO: 19537 - DNA, 21 bp, Homo sapiens
tttgcaacacytatcaatcaa

SEQ ID NO: 19538 - DNA, 21 bp, Homo sapiens
ttccagttcayttataagctc

SEQ ID NO: 19539 - DNA, 21 bp, Homo sapiens
taaaaattcarggatgacttc

SEQ ID NO: 19540 - DNA, 21 bp, Homo sapiens
atgaattgatracatggcata

SEQ ID NO: 19541 - DNA, 21 bp, Homo sapiens
tccacattctkcacaccagtc

SEQ ID NO: 19542 - DNA, 21 bp, Homo sapiens
tcatgcagacraatggttagt

SEQ ID NO: 19543 - DNA, 21 bp, Homo sapiens
tatcatatttyacattgaaat

SEQ ID NO: 19544 - DNA, 21 bp, Homo sapiens
tctcaaaatgrtgttctacaa

SEQ ID NO: 19545 - DNA, 21 bp, Homo sapiens
tttaaacagtrgaatattgta

SEQ ID NO: 19546 - DNA, 21 bp, Homo sapiens
ctcttattacstggcataaga

SEQ ID NO: 19547 - DNA, 21 bp, Homo sapiens
gattagagtcwttactcttag

SEQ ID NO: 19548 - DNA, 21 bp, Homo sapiens
attaaagagtrtagtacttag

SEQ ID NO: 19549 - DNA, 21 bp, Homo sapiens
ctggaagagayaacagcaatc

SEQ ID NO: 19550 - DNA, 21 bp, Homo sapiens
ggattaaagtkttttttttaa

SEQ ID NO: 19551 - DNA, 21 bp, Homo sapiens
atggataacamccatgaagct

SEQ ID NO: 19552 - DNA, 21 bp, Homo sapiens
aggctacaacmcctagagctc

SEQ ID NO: 19553 - DNA, 21 bp, Homo sapiens
tattaggtaargcttcttgat

SEQ ID NO: 19554 - DNA, 21 bp, Homo sapiens
agtcattaccragaattctgt

SEQ ID NO: 19555 - DNA, 21 bp, Homo sapiens
cccaaatttcrtctttgtctc

SEQ ID NO: 19556 - DNA, 21 bp, Homo sapiens
ttaaatggagytataaaggtc

SEQ ID NO: 19557 - DNA, 21 bp, Homo sapiens
aagttggttcyaaaaatgact

SEQ ID NO: 19558 - DNA, 21 bp, Homo sapiens
gtaactagaarcaccattggt

SEQ ID NO: 19559 - DNA, 21 bp, Homo sapiens
aggcagatgayatgaacccct

SEQ ID NO: 19560 - DNA, 21 bp, Homo sapiens
aatttgggttratgatgcaga

SEQ ID NO: 19561 - DNA, 21 bp, Homo sapiens
ctatgttaacycttcctgttt

SEQ ID NO: 19562 - DNA, 21 bp, Homo sapiens
taacagtttcrttaatgatac

SEQ ID NO: 19563 - DNA, 21 bp, Homo sapiens
gtcaccccacyattgatgttc

SEQ ID NO: 19564 - DNA, 21 bp, Homo sapiens
tatggtagatrtattcacaaa

SEQ ID NO: 19565 - DNA, 21 bp, Homo sapiens
gaactaggacsaaattattct

SEQ ID NO: 19566 - DNA, 21 bp, Homo sapiens
tttaagctatrcagatgtctg

SEQ ID NO: 19567 - DNA, 21 bp, Homo sapiens
aaaatgttaastcgtacagta

SEQ ID NO: 19568 - DNA, 21 bp, Homo sapiens
acaaattgaaktgcttgaaca

SEQ ID NO: 19569 - DNA, 21 bp, Homo sapiens
gaagatggacrttaggaaact

SEQ ID NO: 19570 - DNA, 21 bp, Homo sapiens
ggtatgtaatwtttttttaaa

SEQ ID NO: 19571 - DNA, 21 bp, Homo sapiens
gtaaatgtctstactatgcca

SEQ ID NO: 19572 - DNA, 21 bp, Homo sapiens
tgatgaagaaractctagtaa

SEQ ID NO: 19573 - DNA, 21 bp, Homo sapiens
aaatttttttracataggaga

SEQ ID NO: 19574 - DNA, 21 bp, Homo sapiens
gaatatggcargagactctgt

SEQ ID NO: 19575 - DNA, 21 bp, Homo sapiens
aatgttagggrtatttatttt

SEQ ID NO: 19576 - DNA, 21 bp, Homo sapiens
aacttgctccsgtgtctttgt

SEQ ID NO: 19577 - DNA, 21 bp, Homo sapiens
cctcctcattyggttcttttt

SEQ ID NO: 19578 - DNA, 21 bp, Homo sapiens
gttttatgttyactcttttaa

SEQ ID NO: 19579 - DNA, 21 bp, Homo sapiens
tatactccttkgtagttgcct

SEQ ID NO: 19580 - DNA, 21 bp, Homo sapiens
agcctttattkttcagccctt

SEQ ID NO: 19581 - DNA, 21 bp, Homo sapiens
gttttggaatyacctctgtga

SEQ ID NO: 19582 - DNA, 21 bp, Homo sapiens
gcactgatttsctaccaagcc

SEQ ID NO: 19583 - DNA, 21 bp, Homo sapiens
gttctctgctrttggtaatga

SEQ ID NO: 19584 - DNA, 21 bp, Homo sapiens
ggtctccctcrccaaaccttt

SEQ ID NO: 19585 - DNA, 21 bp, Homo sapiens
ctatgcccaayatgttttcat

SEQ ID NO: 19586 - DNA, 21 bp, Homo sapiens
ttaaaaacccrtccaatgctg

SEQ ID NO: 19587 - DNA, 21 bp, Homo sapiens
attcagcctcmctgggtatca

SEQ ID NO: 19588 - DNA, 21 bp, Homo sapiens
gatatcttttkaattgctaag

SEQ ID NO: 19589 - DNA, 21 bp, Homo sapiens
tgaagcttatrctagaaatgt

SEQ ID NO: 19590 - DNA, 21 bp, Homo sapiens
agacctttggracacagcttg

SEQ ID NO: 19591 - DNA, 21 bp, Homo sapiens
aagacacaggrctatatagga

SEQ ID NO: 19592 - DNA, 21 bp, Homo sapiens
gcaaaagtcaragttagaact

SEQ ID NO: 19593 - DNA, 21 bp, Homo sapiens
taaagacaggytctgagaatg

SEQ ID NO: 19594 - DNA, 21 bp, Homo sapiens
tctactgtaastctaaaaatt

SEQ ID NO: 19595 - DNA, 21 bp, Homo sapiens
tctaacacagrgcatcataaa

SEQ ID NO: 19596 - DNA, 21 bp, Homo sapiens
taacaatgctygtgaaatagc

SEQ ID NO: 19597 - DNA, 21 bp, Homo sapiens
tcaggaagaayatccccaaag

SEQ ID NO: 19598 - DNA, 21 bp, Homo sapiens
acaaggattcyttttagactc

SEQ ID NO: 19599 - DNA, 21 bp, Homo sapiens
tgtataccacrgtttaagttg

SEQ ID NO: 19600 - DNA, 21 bp, Homo sapiens
ttttcacaatmtccagctgtt

SEQ ID NO: 19601 - DNA, 21 bp, Homo sapiens
agtcagtatcwgggttctttg

SEQ ID NO: 19602 - DNA, 21 bp, Homo sapiens
cacccgtttarcactcttttg

SEQ ID NO: 19603 - DNA, 21 bp, Homo sapiens
agactggacascatcttgtaa

SEQ ID NO: 19604 - DNA, 21 bp, Homo sapiens
gaactctttcscagagaactc

SEQ ID NO: 19605 - DNA, 21 bp, Homo sapiens
tccctcatctrggacaatctc

SEQ ID NO: 19606 - DNA, 21 bp, Homo sapiens
ttgtgggccaytaataaatgc

SEQ ID NO: 19607 - DNA, 21 bp, Homo sapiens
ttcagattaasttgaaaacca

SEQ ID NO: 19608 - DNA, 21 bp, Homo sapiens
ttcgggccctrtggtctctgc

SEQ ID NO: 19609 - DNA, 21 bp, Homo sapiens
ctttttattayctccttttta

SEQ ID NO: 19610 - DNA, 21 bp, Homo sapiens
ttttggagagytcattccggc

SEQ ID NO: 19611 - DNA, 21 bp, Homo sapiens
cctctcacttytaccgtcttc

SEQ ID NO: 19612 - DNA, 21 bp, Homo sapiens
aactcaggtckgctgcttgac

SEQ ID NO: 19613 - DNA, 21 bp, Homo sapiens
cttatataccyacacaaggca

SEQ ID NO: 19614 - DNA, 21 bp, Homo sapiens
attcattcagyaattgattga

SEQ ID NO: 19615 - DNA, 21 bp, Homo sapiens
tgtttttttcmagcccacttt

SEQ ID NO: 19616 - DNA, 21 bp, Homo sapiens
tggtcctctcrttagacggga

SEQ ID NO: 19617 - DNA, 21 bp, Homo sapiens
gggccggcctractgagttca

SEQ ID NO: 19618 - DNA, 21 bp, Homo sapiens
agacctttgtstatctcagca

SEQ ID NO: 19619 - DNA, 21 bp, Homo sapiens
tctttcttacrgtggcatcct

SEQ ID NO: 19620 - DNA, 21 bp, Homo sapiens
ccctctggaaygccattttcc

SEQ ID NO: 19621 - DNA, 21 bp, Homo sapiens
atctgctccarttcactgtgg

SEQ ID NO: 19622 - DNA, 21 bp, Homo sapiens
cttcatctggwgatcttgact

SEQ ID NO: 19623 - DNA, 21 bp, Homo sapiens
ggcccggtctrcagataagaa

SEQ ID NO: 19624 - DNA, 21 bp, Homo sapiens
tctgcttggawtaaggtgatg

SEQ ID NO: 19625 - DNA, 21 bp, Homo sapiens
tccgttctagyagtgggacag

SEQ ID NO: 19626 - DNA, 21 bp, Homo sapiens
gtaggagaackctccaagggc

SEQ ID NO: 19627 - DNA, 21 bp, Homo sapiens
accttctccargctgactacc

SEQ ID NO: 19628 - DNA, 21 bp, Homo sapiens
tttgataaacrcctagaatcc

SEQ ID NO: 19629 - DNA, 21 bp, Homo sapiens
gatatggactrtaaattggag

SEQ ID NO: 19630 - DNA, 21 bp, Homo sapiens
agtaagaataytgactgctag

SEQ ID NO: 19631 - DNA, 21 bp, Homo sapiens
ttgataaggarctcccctgac

SEQ ID NO: 19632 - DNA, 21 bp, Homo sapiens
tcccatttctstttagaactc

SEQ ID NO: 19633 - DNA, 21 bp, Homo sapiens
tacaggtcacrtccaaagtct

SEQ ID NO: 19634 - DNA, 21 bp, Homo sapiens
aaggcactgtrttacttgctg

SEQ ID NO: 19635 - DNA, 21 bp, Homo sapiens
gctcaagccakcactcaccta

SEQ ID NO: 19636 - DNA, 21 bp, Homo sapiens
ctgaaaacccrtgtgtaactg

SEQ ID NO: 19637 - DNA, 21 bp, Homo sapiens
ttataccttgyagcagtctgt

SEQ ID NO: 19638 - DNA, 21 bp, Homo sapiens
tctgactttgkgtagtcttca

SEQ ID NO: 19639 - DNA, 21 bp, Homo sapiens
agaattattasttcccaaaac

SEQ ID NO: 19640 - DNA, 21 bp, Homo sapiens
gatttggtagrgtagatcccc

SEQ ID NO: 19641 - DNA, 21 bp, Homo sapiens
aagctaaattsacttaactag

SEQ ID NO: 19642 - DNA, 21 bp, Homo sapiens
ttttggaaggytgagacagaa

SEQ ID NO: 19643 - DNA, 21 bp, Homo sapiens
aatattagaaygggagcattt

SEQ ID NO: 19644 - DNA, 21 bp, Homo sapiens
cctgccttggsacaggtgtgt

SEQ ID NO: 19645 - DNA, 21 bp, Homo sapiens
gacaggtgctsgaggtcatgt

SEQ ID NO: 19646 - DNA, 21 bp, Homo sapiens
gtggcagaacyagcggagggt

SEQ ID NO: 19647 - DNA, 21 bp, Homo sapiens
taatataacakttctcaagtt

SEQ ID NO: 19648 - DNA, 21 bp, Homo sapiens
gagcagaaaargactttgtac

SEQ ID NO: 19649 - DNA, 21 bp, Homo sapiens
gttgtagttamgcaaattttg

SEQ ID NO: 19650 - DNA, 21 bp, Homo sapiens
aggtttcattrtcaccaatct

SEQ ID NO: 19651 - DNA, 21 bp, Homo sapiens
tgaaggactcytgactttttc

SEQ ID NO: 19652 - DNA, 21 bp, Homo sapiens
tgttaggagcrgataaagata

SEQ ID NO: 19653 - DNA, 21 bp, Homo sapiens
acggtctacaratacttgctg

SEQ ID NO: 19654 - DNA, 21 bp, Homo sapiens
cctaatctacratatgaagga

SEQ ID NO: 19655 - DNA, 21 bp, Homo sapiens
ccctaaatgcrtcaaaccttg

SEQ ID NO: 19656 - DNA, 21 bp, Homo sapiens
taaagacccaygtttctattt

SEQ ID NO: 19657 - DNA, 21 bp, Homo sapiens
ctgctttagartataaattga

SEQ ID NO: 19658 - DNA, 21 bp, Homo sapiens
ctctacccagyggccttgctt

SEQ ID NO: 19659 - DNA, 21 bp, Homo sapiens
tgagtcctgtyagtcatcaaa

SEQ ID NO: 19660 - DNA, 21 bp, Homo sapiens
atctgctgccrtcttctagca

SEQ ID NO: 19661 - DNA, 21 bp, Homo sapiens
tttcctggatrtgcctcttag

SEQ ID NO: 19662 - DNA, 21 bp, Homo sapiens
attcagatccrgaaattgatt

SEQ ID NO: 19663 - DNA, 21 bp, Homo sapiens
atcaggctackgtaagaaatt

SEQ ID NO: 19664 - DNA, 21 bp, Homo sapiens
attgagctcaygaactcaaat

SEQ ID NO: 19665 - DNA, 21 bp, Homo sapiens
gtttctcccargaaaatttcc

SEQ ID NO: 19666 - DNA, 21 bp, Homo sapiens
tccttcattcrcctaccacca

SEQ ID NO: 19667 - DNA, 21 bp, Homo sapiens
cccatcaaatragcctatctg

SEQ ID NO: 19668 - DNA, 21 bp, Homo sapiens
ctttatgtagwgaaatatctt

SEQ ID NO: 19669 - DNA, 21 bp, Homo sapiens
aatcaaggtcyccttcttggt

SEQ ID NO: 19670 - DNA, 21 bp, Homo sapiens
ggccatcctcractccacccc

SEQ ID NO: 19671 - DNA, 21 bp, Homo sapiens
tcttgttcaaktcttctcagc

SEQ ID NO: 19672 - DNA, 21 bp, Homo sapiens
aagttataaaytacagcttag

SEQ ID NO: 19673 - DNA, 21 bp, Homo sapiens
actaaaatacwgccgaagagg

SEQ ID NO: 19674 - DNA, 21 bp, Homo sapiens
ggcttcaatcscttcggttga

SEQ ID NO: 19675 - DNA, 21 bp, Homo sapiens
cattattattygcattatctt

SEQ ID NO: 19676 - DNA, 21 bp, Homo sapiens
ctttaaaaagktcctttcctc

SEQ ID NO: 19677 - DNA, 21 bp, Homo sapiens
ctctctgaggycaatgaatgc

SEQ ID NO: 19678 - DNA, 21 bp, Homo sapiens
ctcttttgacycttggtgaag

SEQ ID NO: 19679 - DNA, 21 bp, Homo sapiens
aggtcgcctgrgaggcctgag

SEQ ID NO: 19680 - DNA, 21 bp, Homo sapiens
caatagccctrtaagatcaac

SEQ ID NO: 19681 - DNA, 21 bp, Homo sapiens
attttggatgrcaatgcttct

SEQ ID NO: 19682 - DNA, 21 bp, Homo sapiens
ttaattttaaraggtcaaaca

SEQ ID NO: 19683 - DNA, 21 bp, Homo sapiens
aaccaatccayagagctttct

SEQ ID NO: 19684 - DNA, 21 bp, Homo sapiens
tccaaggttcrgtgcaccaaa

SEQ ID NO: 19685 - DNA, 21 bp, Homo sapiens
gggtggttatyatgtgagaca

SEQ ID NO: 19686 - DNA, 21 bp, Homo sapiens
tattggccatyacttcctctc

SEQ ID NO: 19687 - DNA, 21 bp, Homo sapiens
acaaggtgtgkctcatctgtt

SEQ ID NO: 19688 - DNA, 21 bp, Homo sapiens
attctccaatytagctgtttc

SEQ ID NO: 19689 - DNA, 21 bp, Homo sapiens
atgttccatcrctctgactaa

SEQ ID NO: 19690 - DNA, 21 bp, Homo sapiens
agatccctgcycattgggata

SEQ ID NO: 19691 - DNA, 21 bp, Homo sapiens
ctctgaagctyggactggaca

SEQ ID NO: 19692 - DNA, 21 bp, Homo sapiens
atttcacccargaggttgtgg

SEQ ID NO: 19693 - DNA, 21 bp, Homo sapiens
tgctcccataycttgaattcc

SEQ ID NO: 19694 - DNA, 21 bp, Homo sapiens
tttggtattcrtgccggtgtg

SEQ ID NO: 19695 - DNA, 21 bp, Homo sapiens
gctgttgctgrcaggcacaca

SEQ ID NO: 19696 - DNA, 21 bp, Homo sapiens
aatataatcamgaaaagtcag

SEQ ID NO: 19697 - DNA, 21 bp, Homo sapiens
atctgcaagtrgcctccaata

SEQ ID NO: 19698 - DNA, 21 bp, Homo sapiens
gcctcttatcrtgactagtgg

SEQ ID NO: 19699 - DNA, 21 bp, Homo sapiens
aataatagacrgtttcagaac

SEQ ID NO: 19700 - DNA, 21 bp, Homo sapiens
ttttcccttaygtgataggat

SEQ ID NO: 19701 - DNA, 21 bp, Homo sapiens
atattaatgckcatatagata

SEQ ID NO: 19702 - DNA, 21 bp, Homo sapiens
tgaatgtgggraaatgatttt

SEQ ID NO: 19703 - DNA, 21 bp, Homo sapiens
gttacgtgggytatttcaaaa

SEQ ID NO: 19704 - DNA, 21 bp, Homo sapiens
agattattcartggcagtaac

SEQ ID NO: 19705 - DNA, 21 bp, Homo sapiens
cttgcctttawtatgttctga

SEQ ID NO: 19706 - DNA, 21 bp, Homo sapiens
aaaactaatcstgatgctgtt

SEQ ID NO: 19707 - DNA, 21 bp, Homo sapiens
atccttcgtgyagcctgtcaa

SEQ ID NO: 19708 - DNA, 21 bp, Homo sapiens
gtagtaacaarcatcagacat

SEQ ID NO: 19709 - DNA, 21 bp, Homo sapiens
ttggacatttragggtgaggg

SEQ ID NO: 19710 - DNA, 21 bp, Homo sapiens
tatttataacmaattagatga

SEQ ID NO: 19711 - DNA, 21 bp, Homo sapiens
tatctcaaagwttataatgat

SEQ ID NO: 19712 - DNA, 21 bp, Homo sapiens
ggtaccagagrtatgacttaa

SEQ ID NO: 19713 - DNA, 21 bp, Homo sapiens
atctagtaccygtctgtcact

SEQ ID NO: 19714 - DNA, 21 bp, Homo sapiens
tgaacatccarttgatctttg

SEQ ID NO: 19715 - DNA, 21 bp, Homo sapiens
ttgttgatgarattcgaggtt

SEQ ID NO: 19716 - DNA, 21 bp, Homo sapiens
actcaatatamcattttatct

SEQ ID NO: 19717 - DNA, 21 bp, Homo sapiens
gtagtttagayagatttcagc

SEQ ID NO: 19718 - DNA, 21 bp, Homo sapiens
gagagagaatrggaggcctgg

SEQ ID NO: 19719 - DNA, 21 bp, Homo sapiens
caaagggatasataaagttgg

SEQ ID NO: 19720 - DNA, 21 bp, Homo sapiens
ctctggtttaygttaacagga

SEQ ID NO: 19721 - DNA, 21 bp, Homo sapiens
tcaatagttcktaaaattaag

SEQ ID NO: 19722 - DNA, 21 bp, Homo sapiens
atatttgctgsaagtgattat

SEQ ID NO: 19723 - DNA, 21 bp, Homo sapiens
aatgtgaaaawtattcttgct

SEQ ID NO: 19724 - DNA, 21 bp, Homo sapiens
tgcacataccscatcttttaa

SEQ ID NO: 19725 - DNA, 21 bp, Homo sapiens
ttttgccaaarctgaattcag

SEQ ID NO: 19726 - DNA, 21 bp, Homo sapiens
gacaatgtatyctcctggaat

SEQ ID NO: 19727 - DNA, 21 bp, Homo sapiens
gatggatattycagaacagtg

SEQ ID NO: 19728 - DNA, 21 bp, Homo sapiens
caagattagcyaccacgtcaa

SEQ ID NO: 19729 - DNA, 21 bp, Homo sapiens
gataaaatgartctatactgg

SEQ ID NO: 19730 - DNA, 21 bp, Homo sapiens
tagatgaatgytgtatcttct

SEQ ID NO: 19731 - DNA, 21 bp, Homo sapiens
aaagaccatgwccatacgctt

SEQ ID NO: 19732 - DNA, 21 bp, Homo sapiens
attgagaaacycttcacagca

SEQ ID NO: 19733 - DNA, 21 bp, Homo sapiens
tcatgaccttmatcaaataac

SEQ ID NO: 19734 - DNA, 21 bp, Homo sapiens
agggtttaaartgggaacatt

SEQ ID NO: 19735 - DNA, 21 bp, Homo sapiens
agcatgtaagrcataagagat

SEQ ID NO: 19736 - DNA, 21 bp, Homo sapiens
gaatatatcaytgccaacctt

SEQ ID NO: 19737 - DNA, 21 bp, Homo sapiens
aaatattctcyagtcactttc

SEQ ID NO: 19738 - DNA, 21 bp, Homo sapiens
tgatgaaagtyttagtgttct

SEQ ID NO: 19739 - DNA, 21 bp, Homo sapiens
gctgaataagwgttggccaga

SEQ ID NO: 19740 - DNA, 21 bp, Homo sapiens
gatttgttaawccttatccct

SEQ ID NO: 19741 - DNA, 21 bp, Homo sapiens
agtaccaactygttgcagtca

SEQ ID NO: 19742 - DNA, 21 bp, Homo sapiens
agggtctgcgrtgggcaagtc

SEQ ID NO: 19743 - DNA, 21 bp, Homo sapiens
tgtctgacatmagaaatattc

SEQ ID NO: 19744 - DNA, 21 bp, Homo sapiens
tgctttgaagwcatctccagg

SEQ ID NO: 19745 - DNA, 21 bp, Homo sapiens
tttttagggakaagagaccat

SEQ ID NO: 19746 - DNA, 21 bp, Homo sapiens
tttgtctttgyggtttccaat

SEQ ID NO: 19747 - DNA, 21 bp, Homo sapiens
ttcaagctggragtgataagc

SEQ ID NO: 19748 - DNA, 21 bp, Homo sapiens
ccaaactgttyccatgaggaa

SEQ ID NO: 19749 - DNA, 21 bp, Homo sapiens
gctataatacygtcaaaacct

SEQ ID NO: 19750 - DNA, 21 bp, Homo sapiens
tttcaaaataygaatagtctc

SEQ ID NO: 19751 - DNA, 21 bp, Homo sapiens
actatatgccraatggttcta

SEQ ID NO: 19752 - DNA, 21 bp, Homo sapiens
atgatttcttrtaaaggcaaa

SEQ ID NO: 19753 - DNA, 21 bp, Homo sapiens
tgtgatttaastgacgatgaa

SEQ ID NO: 19754 - DNA, 21 bp, Homo sapiens
gcctttccacsaatctttccc

SEQ ID NO: 19755 - DNA, 21 bp, Homo sapiens
caatatgaagktatgcccaca

SEQ ID NO: 19756 - DNA, 21 bp, Homo sapiens
ggctgtcaatratcccccgcc

SEQ ID NO: 19757 - DNA, 21 bp, Homo sapiens
tttgtcagtgytatgggaaag

SEQ ID NO: 19758 - DNA, 21 bp, Homo sapiens
aggtgtctccstgttaaatag

SEQ ID NO: 19759 - DNA, 21 bp, Homo sapiens
aaacaagtagygatgttcaaa

SEQ ID NO: 19760 - DNA, 21 bp, Homo sapiens
gcagatagccmaatgtacaca

SEQ ID NO: 19761 - DNA, 21 bp, Homo sapiens
tttctcttctrggaaaaggca

SEQ ID NO: 19762 - DNA, 21 bp, Homo sapiens
atattctttckcaatgtgttt

SEQ ID NO: 19763 - DNA, 21 bp, Homo sapiens
cctgtatatcytctcagttga

SEQ ID NO: 19764 - DNA, 21 bp, Homo sapiens
gttctgaaccrccttgcactg

SEQ ID NO: 19765 - DNA, 21 bp, Homo sapiens
atgtttagacmagactggaag

SEQ ID NO: 19766 - DNA, 21 bp, Homo sapiens
tttatggttcrtacgtttgct

SEQ ID NO: 19767 - DNA, 21 bp, Homo sapiens
aactgacctgycccaggtggg

SEQ ID NO: 19768 - DNA, 21 bp, Homo sapiens
ctagccctttrtccaagcaca

SEQ ID NO: 19769 - DNA, 21 bp, Homo sapiens
ccatctcctckgctagatttg

SEQ ID NO: 19770 - DNA, 21 bp, Homo sapiens
ggatggatagwggcaagcata

SEQ ID NO: 19771 - DNA, 21 bp, Homo sapiens
aattcgttacrtattattttc

SEQ ID NO: 19772 - DNA, 21 bp, Homo sapiens
aacttttcttrtggttaattg

SEQ ID NO: 19773 - DNA, 21 bp, Homo sapiens
agaggtcgctrtcctaactat

SEQ ID NO: 19774 - DNA, 21 bp, Homo sapiens
ctactgctctsaccttatgcc

SEQ ID NO: 19775 - DNA, 21 bp, Homo sapiens
taatttagtgrcaactaccta

SEQ ID NO: 19776 - DNA, 21 bp, Homo sapiens
acaaaactcartgagatgccc

SEQ ID NO: 19777 - DNA, 21 bp, Homo sapiens
gaggtttgtcktagtcccatt

SEQ ID NO: 19778 - DNA, 21 bp, Homo sapiens
ataacttcacmttcatagaaa

SEQ ID NO: 19779 - DNA, 21 bp, Homo sapiens
tcttactaagytaaatttcat

SEQ ID NO: 19780 - DNA, 21 bp, Homo sapiens
ggtctcagatrgcattggtga

SEQ ID NO: 19781 - DNA, 21 bp, Homo sapiens
gcaagttcatytgtgccaacg

SEQ ID NO: 19782 - DNA, 21 bp, Homo sapiens
agcgcgtatgstttgagttgc

SEQ ID NO: 19783 - DNA, 21 bp, Homo sapiens
actgctaggawgacggagggg

SEQ ID NO: 19784 - DNA, 21 bp, Homo sapiens
ccacttgcctygtgttgtgaa

SEQ ID NO: 19785 - DNA, 21 bp, Homo sapiens
gaatgagagtmtctgcagttt

SEQ ID NO: 19786 - DNA, 21 bp, Homo sapiens
gggagtccacstagctggagg

SEQ ID NO: 19787 - DNA, 21 bp, Homo sapiens
ccagctgaggwggcccataga

SEQ ID NO: 19788 - DNA, 21 bp, Homo sapiens
atgtcttctasagctcgtttt

SEQ ID NO: 19789 - DNA, 21 bp, Homo sapiens
atttgcagaamatctcgacaa

SEQ ID NO: 19790 - DNA, 21 bp, Homo sapiens
aaagttttgcygtatctatga

SEQ ID NO: 19791 - DNA, 21 bp, Homo sapiens
tcttaaaaacytgcttttcat

SEQ ID NO: 19792 - DNA, 21 bp, Homo sapiens
tcttaagctgyttatataaac

SEQ ID NO: 19793 - DNA, 21 bp, Homo sapiens
ccaatgaaacrtttcagtcct

SEQ ID NO: 19794 - DNA, 21 bp, Homo sapiens
tttccaacagsctggatgtct

SEQ ID NO: 19795 - DNA, 21 bp, Homo sapiens
cgactaactayggtcacataa

SEQ ID NO: 19796 - DNA, 21 bp, Homo sapiens
aaaagacgtayttttgtcagc

SEQ ID NO: 19797 - DNA, 21 bp, Homo sapiens
agtcccgaacwgtggcttgac

SEQ ID NO: 19798 - DNA, 21 bp, Homo sapiens
acatctaagayaaagtttaag

SEQ ID NO: 19799 - DNA, 21 bp, Homo sapiens
taaaagatgayccaattgatt

SEQ ID NO: 19800 - DNA, 21 bp, Homo sapiens
aggctgacatyttccctagct

SEQ ID NO: 19801 - DNA, 21 bp, Homo sapiens
gaatcaagttrgggttttaca

SEQ ID NO: 19802 - DNA, 21 bp, Homo sapiens
gggatttctgygatctcctgg

SEQ ID NO: 19803 - DNA, 21 bp, Homo sapiens
cagagaagtcrgcccccaaag

SEQ ID NO: 19804 - DNA, 21 bp, Homo sapiens
aactggtaatmagactgagag

SEQ ID NO: 19805 - DNA, 21 bp, Homo sapiens
aaagaacttaygtccacgttg

SEQ ID NO: 19806 - DNA, 21 bp, Homo sapiens
ggcttctaacrctaagcagct

SEQ ID NO: 19807 - DNA, 21 bp, Homo sapiens
tgatgtattgwgatgtaaatg

SEQ ID NO: 19808 - DNA, 21 bp, Homo sapiens
aaaatacgtasaagaaactct

SEQ ID NO: 19809 - DNA, 21 bp, Homo sapiens
atgaacccacractacagctg

SEQ ID NO: 19810 - DNA, 21 bp, Homo sapiens
acctcccccgycccgtgtcct

SEQ ID NO: 19811 - DNA, 21 bp, Homo sapiens
ggcatgcctgyggcccgacac

SEQ ID NO: 19812 - DNA, 21 bp, Homo sapiens
gcgggaacagsagaggcaaga

SEQ ID NO: 19813 - DNA, 21 bp, Homo sapiens
acactgcagcyggcctgggca

SEQ ID NO: 19814 - DNA, 21 bp, Homo sapiens
ctagtgggacrctcagtgcta

SEQ ID NO: 19815 - DNA, 21 bp, Homo sapiens
agctcctcttyttctgctggt

SEQ ID NO: 19816 - DNA, 21 bp, Homo sapiens
gcatgtgatcsgtatggtact

SEQ ID NO: 19817 - DNA, 21 bp, Homo sapiens
tggattttatwttgatgaatg

SEQ ID NO: 19818 - DNA, 21 bp, Homo sapiens
atcatcatctyccggattccc

SEQ ID NO: 19819 - DNA, 21 bp, Homo sapiens
tccaggcacayagaggctccg

SEQ ID NO: 19820 - DNA, 21 bp, Homo sapiens
agcagatttayttttttggct

SEQ ID NO: 19821 - DNA, 21 bp, Homo sapiens
aaaacacaagmtatagggact

SEQ ID NO: 19822 - DNA, 21 bp, Homo sapiens
ataggtatcawttccacaaat

SEQ ID NO: 19823 - DNA, 21 bp, Homo sapiens
cattataactytttcctttaa

SEQ ID NO: 19824 - DNA, 21 bp, Homo sapiens
caatcgcgagktcagaaaatg

SEQ ID NO: 19825 - DNA, 21 bp, Homo sapiens
ccaggagaagrgtctggcccg

SEQ ID NO: 19826 - DNA, 21 bp, Homo sapiens
ggaaatagagyccggcccttg

SEQ ID NO: 19827 - DNA, 21 bp, Homo sapiens
tttcttcgaasttggtcaacc

SEQ ID NO: 19828 - DNA, 21 bp, Homo sapiens
aatactccacygtgggacacg

SEQ ID NO: 19829 - DNA, 21 bp, Homo sapiens
gaccaagtggraaaagccaag

SEQ ID NO: 19830 - DNA, 21 bp, Homo sapiens
actatattcaygtttggcctc

SEQ ID NO: 19831 - DNA, 21 bp, Homo sapiens
gatacatccayggctcagcac

SEQ ID NO: 19832 - DNA, 21 bp, Homo sapiens
ggtattttatygttcccaaat

SEQ ID NO: 19833 - DNA, 21 bp, Homo sapiens
cttcctctccytacatactct

SEQ ID NO: 19834 - DNA, 21 bp, Homo sapiens
gaaagaaaccrtagctactaa

SEQ ID NO: 19835 - DNA, 21 bp, Homo sapiens
catatgtaatygccatggctt

SEQ ID NO: 19836 - DNA, 21 bp, Homo sapiens
catgaatactrcagatctcac

SEQ ID NO: 19837 - DNA, 21 bp, Homo sapiens
ctaataatatwcatgagttgg

SEQ ID NO: 19838 - DNA, 21 bp, Homo sapiens
ctctaaaacargtatgcactc

SEQ ID NO: 19839 - DNA, 21 bp, Homo sapiens
aagtaggtacraagcaagaag

SEQ ID NO: 19840 - DNA, 21 bp, Homo sapiens
tctagtggtayggccaaataa

SEQ ID NO: 19841 - DNA, 21 bp, Homo sapiens
caatccttacrcaggcctgtc

SEQ ID NO: 19842 - DNA, 21 bp, Homo sapiens
tatatttcttkaattttctat

SEQ ID NO: 19843 - DNA, 21 bp, Homo sapiens
taaaagataamtacatcacag

SEQ ID NO: 19844 - DNA, 21 bp, Homo sapiens
attacaaaacsagttgctgcc

SEQ ID NO: 19845 - DNA, 21 bp, Homo sapiens
ctaagattcaraaataagagt

SEQ ID NO: 19846 - DNA, 21 bp, Homo sapiens
acacctttggrtctatcaact

SEQ ID NO: 19847 - DNA, 21 bp, Homo sapiens
gtggcaaagtktatgaaaatg

SEQ ID NO: 19848 - DNA, 21 bp, Homo sapiens
acaactctatrtatgcctgta

SEQ ID NO: 19849 - DNA, 21 bp, Homo sapiens
aaggtgaagamcaactccagt

SEQ ID NO: 19850 - DNA, 21 bp, Homo sapiens
cctatgaccargtcactacag

SEQ ID NO: 19851 - DNA, 21 bp, Homo sapiens
acaagtttcaytgtggctcta

SEQ ID NO: 19852 - DNA, 21 bp, Homo sapiens
gtcttctgtgwgctcccaatc

SEQ ID NO: 19853 - DNA, 21 bp, Homo sapiens
atgagtcctgsacacctacca

SEQ ID NO: 19854 - DNA, 21 bp, Homo sapiens
gtaagttgtcsaaaattattc

SEQ ID NO: 19855 - DNA, 21 bp, Homo sapiens
gctaaggactrctaacacctg

SEQ ID NO: 19856 - DNA, 21 bp, Homo sapiens
gtatttcttawtgtagagact

SEQ ID NO: 19857 - DNA, 21 bp, Homo sapiens
tgtgtcttgcsatgctaaagg

SEQ ID NO: 19858 - DNA, 21 bp, Homo sapiens
ctcctttctgrttgtggaaga

SEQ ID NO: 19859 - DNA, 21 bp, Homo sapiens
ttatttaatgrggctggagga

SEQ ID NO: 19860 - DNA, 21 bp, Homo sapiens
cttccgctcaygagatcacaa

SEQ ID NO: 19861 - DNA, 21 bp, Homo sapiens
ccctgtctccrtattcatttt

SEQ ID NO: 19862 - DNA, 21 bp, Homo sapiens
ctatgatcttratgttgcttc

SEQ ID NO: 19863 - DNA, 21 bp, Homo sapiens
tagtcactcamatggtaaaag

SEQ ID NO: 19864 - DNA, 21 bp, Homo sapiens
ttccaaacagrttatttgatg

SEQ ID NO: 19865 - DNA, 21 bp, Homo sapiens
cttagtccttrgatcataaaa

SEQ ID NO: 19866 - DNA, 21 bp, Homo sapiens
tatatatcctrtaatgtgcac

SEQ ID NO: 19867 - DNA, 21 bp, Homo sapiens
gaggagctgtracatgaaatt

SEQ ID NO: 19868 - DNA, 21 bp, Homo sapiens
taccaaggggmtagttgctgt

SEQ ID NO: 19869 - DNA, 21 bp, Homo sapiens
tcgtccatgtwatccttttat

SEQ ID NO: 19870 - DNA, 21 bp, Homo sapiens
gtgcttggagmtcaatagaca

SEQ ID NO: 19871 - DNA, 21 bp, Homo sapiens
cagggatggaytttttgtagt

SEQ ID NO: 19872 - DNA, 21 bp, Homo sapiens
atttgaattawtatgtagatc

SEQ ID NO: 19873 - DNA, 21 bp, Homo sapiens
ctaaacagagrgacctaaatc

SEQ ID NO: 19874 - DNA, 21 bp, Homo sapiens
gactctgcacrtctaatttgc

SEQ ID NO: 19875 - DNA, 21 bp, Homo sapiens
atttcctcttygagttctttt

SEQ ID NO: 19876 - DNA, 21 bp, Homo sapiens
caacagaatcrtgcatttacc

SEQ ID NO: 19877 - DNA, 21 bp, Homo sapiens
tgtaattttaytgtaggctgt

SEQ ID NO: 19878 - DNA, 21 bp, Homo sapiens
ttgaaatgagytgagatgatt

SEQ ID NO: 19879 - DNA, 21 bp, Homo sapiens
ggccctcaaayagaaccttca

SEQ ID NO: 19880 - DNA, 21 bp, Homo sapiens
tttttgtagcytgatgtttaa

SEQ ID NO: 19881 - DNA, 21 bp, Homo sapiens
tgtatacatcytcagagttca

SEQ ID NO: 19882 - DNA, 21 bp, Homo sapiens
atccaagaagsctgaactttg

SEQ ID NO: 19883 - DNA, 21 bp, Homo sapiens
tagaaaataakgtacaaatgt

SEQ ID NO: 19884 - DNA, 21 bp, Homo sapiens
tggtgctggaygtaaataatc

SEQ ID NO: 19885 - DNA, 21 bp, Homo sapiens
gacacataaaygtctggaaat

SEQ ID NO: 19886 - DNA, 21 bp, Homo sapiens
gttcctgagtmaagtcactga

SEQ ID NO: 19887 - DNA, 21 bp, Homo sapiens
taaatgaagayatacacagtt

SEQ ID NO: 19888 - DNA, 21 bp, Homo sapiens
ataataagatrctataataaa

SEQ ID NO: 19889 - DNA, 21 bp, Homo sapiens
cagtctgatgygttgtcttgc

SEQ ID NO: 19890 - DNA, 21 bp, Homo sapiens
tttatccccgwtattatttgt

SEQ ID NO: 19891 - DNA, 21 bp, Homo sapiens
tatgatgtgtrtggatctact

SEQ ID NO: 19892 - DNA, 21 bp, Homo sapiens
tgagccaattrtggtgaatat

SEQ ID NO: 19893 - DNA, 21 bp, Homo sapiens
taaatagtgtstcctgagaga

SEQ ID NO: 19894 - DNA, 21 bp, Homo sapiens
ttctctatcasgtacattcta

SEQ ID NO: 19895 - DNA, 21 bp, Homo sapiens
cttctatttcragatatctgc

SEQ ID NO: 19896 - DNA, 21 bp, Homo sapiens
gggtgtgctgkagaaacacta

SEQ ID NO: 19897 - DNA, 21 bp, Homo sapiens
aaatgccttcycaaaattcac

SEQ ID NO: 19898 - DNA, 21 bp, Homo sapiens
tgtgtggagargagctttgtg

SEQ ID NO: 19899 - DNA, 21 bp, Homo sapiens
ccattgtccargttttcagga

SEQ ID NO: 19900 - DNA, 21 bp, Homo sapiens
tttctatgtayataatattca

SEQ ID NO: 19901 - DNA, 21 bp, Homo sapiens
tgactagataygtaaatgggt

SEQ ID NO: 19902 - DNA, 21 bp, Homo sapiens
ttacattttawttttcactaa

SEQ ID NO: 19903 - DNA, 21 bp, Homo sapiens
ttttaataggrgctaatacag

SEQ ID NO: 19904 - DNA, 21 bp, Homo sapiens
atcccagcaasaagacccagt

SEQ ID NO: 19905 - DNA, 21 bp, Homo sapiens
gttctctcagmagccaataca

SEQ ID NO: 19906 - DNA, 21 bp, Homo sapiens
agacctaatayagagttgata

SEQ ID NO: 19907 - DNA, 21 bp, Homo sapiens
ccaaacaaggwtgacttctct

SEQ ID NO: 19908 - DNA, 21 bp, Homo sapiens
atcacttgccwgaatcctttg

SEQ ID NO: 19909 - DNA, 21 bp, Homo sapiens
tgatgaccctrcaatttcaga

SEQ ID NO: 19910 - DNA, 21 bp, Homo sapiens
ttccaaaagtrtatatcttaa

SEQ ID NO: 19911 - DNA, 21 bp, Homo sapiens
gattcattaawttccttaaaa

SEQ ID NO: 19912 - DNA, 21 bp, Homo sapiens
ccattcttcarcgctcatcca

SEQ ID NO: 19913 - DNA, 21 bp, Homo sapiens
atacctgttcrtgttcatctt

SEQ ID NO: 19914 - DNA, 21 bp, Homo sapiens
gaaattatcakaattatcaga

SEQ ID NO: 19915 - DNA, 21 bp, Homo sapiens
ggctctgcagmgtctccccca

SEQ ID NO: 19916 - DNA, 21 bp, Homo sapiens
ccctccaggaygtttctctac

SEQ ID NO: 19917 - DNA, 21 bp, Homo sapiens
tgggccattckgccttctctc

SEQ ID NO: 19918 - DNA, 21 bp, Homo sapiens
gaagataatarcaaattaact

SEQ ID NO: 19919 - DNA, 21 bp, Homo sapiens
gaagaatgtgmtataaattga

SEQ ID NO: 19920 - DNA, 21 bp, Homo sapiens
ggtcctctgcragcaccccct

SEQ ID NO: 19921 - DNA, 21 bp, Homo sapiens
atagatacttrgtctgtatat

SEQ ID NO: 19922 - DNA, 21 bp, Homo sapiens
acctggttttsttcactatgg

SEQ ID NO: 19923 - DNA, 21 bp, Homo sapiens
tacttcactaygaaatgaggc

SEQ ID NO: 19924 - DNA, 21 bp, Homo sapiens
agtttattctmtagagattca

SEQ ID NO: 19925 - DNA, 21 bp, Homo sapiens
gtggctaaagratccatgact

SEQ ID NO: 19926 - DNA, 21 bp, Homo sapiens
aagcattgccrgccaggtctc

SEQ ID NO: 19927 - DNA, 21 bp, Homo sapiens
ttttgcccacytgacatcaaa

SEQ ID NO: 19928 - DNA, 21 bp, Homo sapiens
ggcttagagcktccttgtaat

SEQ ID NO: 19929 - DNA, 21 bp, Homo sapiens
acaagcttttwgcctactcat

SEQ ID NO: 19930 - DNA, 21 bp, Homo sapiens
agctacagccrttatctacat

SEQ ID NO: 19931 - DNA, 21 bp, Homo sapiens
ttattaaagcytggagctgac

SEQ ID NO: 19932 - DNA, 21 bp, Homo sapiens
taactgagctygtttttattc

SEQ ID NO: 19933 - DNA, 21 bp, Homo sapiens
aaagaatactrgatttgttag

SEQ ID NO: 19934 - DNA, 21 bp, Homo sapiens
gtttagatctytcatccattt

SEQ ID NO: 19935 - DNA, 21 bp, Homo sapiens
ggatggagatrggatgataat

SEQ ID NO: 19936 - DNA, 21 bp, Homo sapiens
ccactgatccyacagaaatta

SEQ ID NO: 19937 - DNA, 21 bp, Homo sapiens
ttcagatattsaaacagaaaa

SEQ ID NO: 19938 - DNA, 21 bp, Homo sapiens
taaaggatagytgggtgttta

SEQ ID NO: 19939 - DNA, 21 bp, Homo sapiens
aaaagataagrtaaaacttga

SEQ ID NO: 19940 - DNA, 21 bp, Homo sapiens
ccctattttasttaatgttca

SEQ ID NO: 19941 - DNA, 21 bp, Homo sapiens
agcttgttggmaaaaggaaaa

SEQ ID NO: 19942 - DNA, 21 bp, Homo sapiens
aggcattgtaygtgctttggt

SEQ ID NO: 19943 - DNA, 21 bp, Homo sapiens
gacaaaagtcraagccaaagc

SEQ ID NO: 19944 - DNA, 21 bp, Homo sapiens
cttcatctaamcttatgtcag

SEQ ID NO: 19945 - DNA, 21 bp, Homo sapiens
aacatctgtayacatctccct

SEQ ID NO: 19946 - DNA, 21 bp, Homo sapiens
gcagtctaggkagagtacaaa

SEQ ID NO: 19947 - DNA, 21 bp, Homo sapiens
cagcaatgacrgggcagctgg

SEQ ID NO: 19948 - DNA, 21 bp, Homo sapiens
aagcagagggragcaggcaca

SEQ ID NO: 19949 - DNA, 21 bp, Homo sapiens
aaacttttagsacttcacgtt

SEQ ID NO: 19950 - DNA, 21 bp, Homo sapiens
gtaagtctcayagattaacag

SEQ ID NO: 19951 - DNA, 21 bp, Homo sapiens
atacatgctcrtggcaaattt

SEQ ID NO: 19952 - DNA, 21 bp, Homo sapiens
aagaataaaawttatctgaca

SEQ ID NO: 19953 - DNA, 21 bp, Homo sapiens
gttactgctgyacaggtaagg

SEQ ID NO: 19954 - DNA, 21 bp, Homo sapiens
aacgtgtcttytgcaactata

SEQ ID NO: 19955 - DNA, 21 bp, Homo sapiens
atcaaaaacgrcaacaattta

SEQ ID NO: 19956 - DNA, 21 bp, Homo sapiens
attggtttctmaacttgttac

SEQ ID NO: 19957 - DNA, 21 bp, Homo sapiens
tataaagtgartgtgataaga

SEQ ID NO: 19958 - DNA, 21 bp, Homo sapiens
cagtaagcagwtaaattttac

SEQ ID NO: 19959 - DNA, 21 bp, Homo sapiens
caataagacasagaaaactct

SEQ ID NO: 19960 - DNA, 21 bp, Homo sapiens
ttaacttttcrtcaaatgact

SEQ ID NO: 19961 - DNA, 21 bp, Homo sapiens
taaaacagagkccactggaaa

SEQ ID NO: 19962 - DNA, 21 bp, Homo sapiens
acctcctcctyatccctccac

SEQ ID NO: 19963 - DNA, 21 bp, Homo sapiens
agaatcacccygagccctgtt

SEQ ID NO: 19964 - DNA, 21 bp, Homo sapiens
gctacagtgayttgccccagc

SEQ ID NO: 19965 - DNA, 21 bp, Homo sapiens
aatgatctggrtatgtctagg

SEQ ID NO: 19966 - DNA, 21 bp, Homo sapiens
ctgggaaagtstaaccgcggg

SEQ ID NO: 19967 - DNA, 21 bp, Homo sapiens
tgacactcggycttcgattgg

SEQ ID NO: 19968 - DNA, 21 bp, Homo sapiens
tgactttttaktcttgaaacc

SEQ ID NO: 19969 - DNA, 21 bp, Homo sapiens
gaatcataccrtcaagaatta

SEQ ID NO: 19970 - DNA, 21 bp, Homo sapiens
ttgtgtcttawattcatgggc

SEQ ID NO: 19971 - DNA, 21 bp, Homo sapiens
caagaacggcrattttcagtt

SEQ ID NO: 19972 - DNA, 21 bp, Homo sapiens
aaaaatgtctytctagaagcc

SEQ ID NO: 19973 - DNA, 21 bp, Homo sapiens
ttaactggaayttccagaaat

SEQ ID NO: 19974 - DNA, 21 bp, Homo sapiens
tgtccatgcaygtacagagtt

SEQ ID NO: 19975 - DNA, 21 bp, Homo sapiens
ggcagattcgsgagggatgtc

SEQ ID NO: 19976 - DNA, 21 bp, Homo sapiens
actgcctgacrttatatattc

SEQ ID NO: 19977 - DNA, 21 bp, Homo sapiens
tccctttggtyacttattttt

SEQ ID NO: 19978 - DNA, 21 bp, Homo sapiens
ctccaaccaaytggcatgtta

SEQ ID NO: 19979 - DNA, 21 bp, Homo sapiens
tatgtcccaaytcacaatggt

SEQ ID NO: 19980 - DNA, 21 bp, Homo sapiens
gaaattataamggagattgct

SEQ ID NO: 19981 - DNA, 21 bp, Homo sapiens
taaacagcttmttttccttca

SEQ ID NO: 19982 - DNA, 21 bp, Homo sapiens
aattgctagaktcttggattt

SEQ ID NO: 19983 - DNA, 21 bp, Homo sapiens
atgttctctcygatttatgcc

SEQ ID NO: 19984 - DNA, 21 bp, Homo sapiens
ctctgaatacygcctcatgaa

SEQ ID NO: 19985 - DNA, 21 bp, Homo sapiens
ttttgaaataygcttcttaga

SEQ ID NO: 19986 - DNA, 21 bp, Homo sapiens
aaagtaaattyaagtctattc

SEQ ID NO: 19987 - DNA, 21 bp, Homo sapiens
ctacatagtgyaattttaatt

SEQ ID NO: 19988 - DNA, 21 bp, Homo sapiens
tagagatcttsagcctaaaac

SEQ ID NO: 19989 - DNA, 21 bp, Homo sapiens
tgcacgtaatyagtggtattg

SEQ ID NO: 19990 - DNA, 21 bp, Homo sapiens
gatgattcaayattagaaatt

SEQ ID NO: 19991 - DNA, 21 bp, Homo sapiens
gcaaagataakggtcatactc

SEQ ID NO: 19992 - DNA, 21 bp, Homo sapiens
taatgcaaagygatccaactc

SEQ ID NO: 19993 - DNA, 21 bp, Homo sapiens
attctaggaasaaagtgccaa

SEQ ID NO: 19994 - DNA, 21 bp, Homo sapiens
ggttaaggagmaacttcattt

SEQ ID NO: 19995 - DNA, 21 bp, Homo sapiens
agcaaatgtcmtgttctgttt

SEQ ID NO: 19996 - DNA, 21 bp, Homo sapiens
agaatcagatyttaaagcagg

SEQ ID NO: 19997 - DNA, 21 bp, Homo sapiens
ggcttccctakattcaggtag

SEQ ID NO: 19998 - DNA, 21 bp, Homo sapiens
gctatgacttrgtaattaatc

SEQ ID NO: 19999 - DNA, 21 bp, Homo sapiens
tacataaagtyatttaaagtg

SEQ ID NO: 20000 - DNA, 21 bp, Homo sapiens
ttcctttatcwgatgactcct

SEQ ID NO: 20001 - DNA, 21 bp, Homo sapiens
cttttttgagkttgtttcact

SEQ ID NO: 20002 - DNA, 21 bp, Homo sapiens
gagatcacagrggtgtggaaa

SEQ ID NO: 20003 - DNA, 21 bp, Homo sapiens
gtcacgccccygggttcaggt

SEQ ID NO: 20004 - DNA, 21 bp, Homo sapiens
tgcagaaggayggcatcaagg

SEQ ID NO: 20005 - DNA, 21 bp, Homo sapiens
gtcctgttttytcatcacaaa

SEQ ID NO: 20006 - DNA, 21 bp, Homo sapiens
gccatagtcayacagcagcag

SEQ ID NO: 20007 - DNA, 21 bp, Homo sapiens
gtaattaaagmacaaatcaag

SEQ ID NO: 20008 - DNA, 21 bp, Homo sapiens
tgggcgtactyggaagcggaa

SEQ ID NO: 20009 - DNA, 21 bp, Homo sapiens
gtggctgctasagcatccttg

SEQ ID NO: 20010 - DNA, 21 bp, Homo sapiens
taaagttacarggtgcttaat

SEQ ID NO: 20011 - DNA, 21 bp, Homo sapiens
tctttgcaagrgtcaggtggt

SEQ ID NO: 20012 - DNA, 21 bp, Homo sapiens
tcgctacaccrtggaagactg

SEQ ID NO: 20013 - DNA, 21 bp, Homo sapiens
catgaagaaayagtctacctt

SEQ ID NO: 20014 - DNA, 21 bp, Homo sapiens
gcgatgcctcygggatcttcc

SEQ ID NO: 20015 - DNA, 21 bp, Homo sapiens
gttctcaggakgtcttcagga

SEQ ID NO: 20016 - DNA, 21 bp, Homo sapiens
gtccctgattygtcacaatga

SEQ ID NO: 20017 - DNA, 21 bp, Homo sapiens
tgtaaaccgcsgggccccgtc

SEQ ID NO: 20018 - DNA, 21 bp, Homo sapiens
agtgtgcatgrgagccacaga

SEQ ID NO: 20019 - DNA, 21 bp, Homo sapiens
tagtgttttargacatggact

SEQ ID NO: 20020 - DNA, 21 bp, Homo sapiens
tacccgctccyggacaacggg

SEQ ID NO: 20021 - DNA, 21 bp, Homo sapiens
aattagtacartatattgcat

SEQ ID NO: 20022 - DNA, 21 bp, Homo sapiens
tttactgtcastccattcata

SEQ ID NO: 20023 - DNA, 21 bp, Homo sapiens
gtagcaccacrcaggagccta

SEQ ID NO: 20024 - DNA, 21 bp, Homo sapiens
ctcccacattrgcaggccgcc

SEQ ID NO: 20025 - DNA, 21 bp, Homo sapiens
gtggtcatcayggaagggctg

SEQ ID NO: 20026 - DNA, 21 bp, Homo sapiens
accttgcaaakccagttggcg

SEQ ID NO: 20027 - DNA, 21 bp, Homo sapiens
aaatgaacagyatcccctttt

SEQ ID NO: 20028 - DNA, 21 bp, Homo sapiens
attactcacaytttatcagga

SEQ ID NO: 20029 - DNA, 21 bp, Homo sapiens
aggtattgatrcttgacggcc

SEQ ID NO: 20030 - DNA, 21 bp, Homo sapiens
tcactcaattscacatatgag

SEQ ID NO: 20031 - DNA, 21 bp, Homo sapiens
tattttagtgyataaatccgc

SEQ ID NO: 20032 - DNA, 21 bp, Homo sapiens
tggacttttasaactggaagg

SEQ ID NO: 20033 - DNA, 21 bp, Homo sapiens
tcctttgccaygactcccttt

SEQ ID NO: 20034 - DNA, 21 bp, Homo sapiens
gctttggtgayatgaccaagg

SEQ ID NO: 20035 - DNA, 21 bp, Homo sapiens
cgtgtagtcayatacccttct

SEQ ID NO: 20036 - DNA, 21 bp, Homo sapiens
agtaggtactyatttctaaag

SEQ ID NO: 20037 - DNA, 21 bp, Homo sapiens
atttaaaacarggcaatagaa

SEQ ID NO: 20038 - DNA, 21 bp, Homo sapiens
ctgctaattckggattttatg

SEQ ID NO: 20039 - DNA, 21 bp, Homo sapiens
aggtaagcaaytgagtaacta

SEQ ID NO: 20040 - DNA, 21 bp, Homo sapiens
gagaatgacaygaatgagtgt

SEQ ID NO: 20041 - DNA, 21 bp, Homo sapiens
gataagagtgsagcctgtgtg

SEQ ID NO: 20042 - DNA, 21 bp, Homo sapiens
ctgacataaasgggagttgcg

SEQ ID NO: 20043 - DNA, 21 bp, Homo sapiens
tgaaggatctstcaagctctc

SEQ ID NO: 20044 - DNA, 21 bp, Homo sapiens
agataccctgsagtttgggaa

SEQ ID NO: 20045 - DNA, 21 bp, Homo sapiens
cataatgactmtagtatccca

SEQ ID NO: 20046 - DNA, 21 bp, Homo sapiens
tgtctccaccrtgacttatta

SEQ ID NO: 20047 - DNA, 21 bp, Homo sapiens
gcctggaaaarataaggttaa

SEQ ID NO: 20048 - DNA, 21 bp, Homo sapiens
agtgataaagrgaggaccagt

SEQ ID NO: 20049 - DNA, 21 bp, Homo sapiens
tcatttttttwaaatcagtgt

SEQ ID NO: 20050 - DNA, 21 bp, Homo sapiens
tacaaaatacrgagtaatgga

SEQ ID NO: 20051 - DNA, 21 bp, Homo sapiens
actgtttcaartatctactga

SEQ ID NO: 20052 - DNA, 21 bp, Homo sapiens
catttattacygccgagttcc

SEQ ID NO: 20053 - DNA, 21 bp, Homo sapiens
gaatgaaaaarcgctggctct

SEQ ID NO: 20054 - DNA, 21 bp, Homo sapiens
catggcaaggrcagtgtggtt

SEQ ID NO: 20055 - DNA, 21 bp, Homo sapiens
attgacagagyccattacaca

SEQ ID NO: 20056 - DNA, 21 bp, Homo sapiens
agcaccaagakaaatcaaaag

SEQ ID NO: 20057 - DNA, 21 bp, Homo sapiens
cttgtggcccrcgtggaacag

SEQ ID NO: 20058 - DNA, 21 bp, Homo sapiens
atctggccagrtggagagatc

SEQ ID NO: 20059 - DNA, 21 bp, Homo sapiens
atctgtgaacwatatcaaggg

SEQ ID NO: 20060 - DNA, 21 bp, Homo sapiens
tcccatgaggwtaagactacc

SEQ ID NO: 20061 - DNA, 21 bp, Homo sapiens
attttgttttyaagaaaattg

SEQ ID NO: 20062 - DNA, 21 bp, Homo sapiens
tgtggtatatycataaagcga

SEQ ID NO: 20063 - DNA, 21 bp, Homo sapiens
gatgtaagagrgtcttttact

SEQ ID NO: 20064 - DNA, 21 bp, Homo sapiens
agaatgatgartactaagcta

SEQ ID NO: 20065 - DNA, 21 bp, Homo sapiens
agtttttttakaattggaatg

SEQ ID NO: 20066 - DNA, 21 bp, Homo sapiens
gctcctttctyttccaatccc

SEQ ID NO: 20067 - DNA, 21 bp, Homo sapiens
catccaccttygtgtcttgag

SEQ ID NO: 20068 - DNA, 21 bp, Homo sapiens
cacagacgcayatagccacag

SEQ ID NO: 20069 - DNA, 21 bp, Homo sapiens
gcttccaacarggcatggcct

SEQ ID NO: 20070 - DNA, 21 bp, Homo sapiens
taggcttgggrctgcggctgc

SEQ ID NO: 20071 - DNA, 21 bp, Homo sapiens
caggtaggttsggcatccctt

SEQ ID NO: 20072 - DNA, 21 bp, Homo sapiens
gacataaagcrtgtaaaacat

SEQ ID NO: 20073 - DNA, 21 bp, Homo sapiens
gcatgcttatrtttaatagaa

SEQ ID NO: 20074 - DNA, 21 bp, Homo sapiens
tatctctgccytctgggaata

SEQ ID NO: 20075 - DNA, 21 bp, Homo sapiens
tcatagacacrgagttcatgc

SEQ ID NO: 20076 - DNA, 21 bp, Homo sapiens
attgaatgaakactaattttc

SEQ ID NO: 20077 - DNA, 21 bp, Homo sapiens
ctttcccagaragggcaaggc

SEQ ID NO: 20078 - DNA, 21 bp, Homo sapiens
agtgagtgccraagctaattg

SEQ ID NO: 20079 - DNA, 21 bp, Homo sapiens
ggacatttttytctataattg

SEQ ID NO: 20080 - DNA, 21 bp, Homo sapiens
agcagacactmtggttggcag

SEQ ID NO: 20081 - DNA, 21 bp, Homo sapiens
gttcagtgatratgtctttgg

SEQ ID NO: 20082 - DNA, 21 bp, Homo sapiens
atgtcagcttyccaggatgcc

SEQ ID NO: 20083 - DNA, 21 bp, Homo sapiens
attcccacagsacttcgtgtt

SEQ ID NO: 20084 - DNA, 21 bp, Homo sapiens
gccgtatgtaycaaatgcttt

SEQ ID NO: 20085 - DNA, 21 bp, Homo sapiens
tgggaaatgcytatcttaaaa

SEQ ID NO: 20086 - DNA, 21 bp, Homo sapiens
agccgtacatrtttcaggtgt

SEQ ID NO: 20087 - DNA, 21 bp, Homo sapiens
caggcaataayggtccctggc

SEQ ID NO: 20088 - DNA, 21 bp, Homo sapiens
tgtcactgtgkttttgatttc

SEQ ID NO: 20089 - DNA, 21 bp, Homo sapiens
tgtctgccttytaccactttt

SEQ ID NO: 20090 - DNA, 21 bp, Homo sapiens
gaaaatgtaayatttgggttt

SEQ ID NO: 20091 - DNA, 21 bp, Homo sapiens
ccttatgaacyatctgtttat

SEQ ID NO: 20092 - DNA, 21 bp, Homo sapiens
ctgatccttcrcaagtataag

SEQ ID NO: 20093 - DNA, 21 bp, Homo sapiens
cagtaagccaycctatgtcaa

SEQ ID NO: 20094 - DNA, 21 bp, Homo sapiens
agtgttatgtrttggccatta

SEQ ID NO: 20095 - DNA, 21 bp, Homo sapiens
tttgtaattayccaaaatatt

SEQ ID NO: 20096 - DNA, 21 bp, Homo sapiens
agaatacctgygccttcccat

SEQ ID NO: 20097 - DNA, 21 bp, Homo sapiens
ttgcagagaaygacacccaat

SEQ ID NO: 20098 - DNA, 21 bp, Homo sapiens
acatttagccwcacactttaa

SEQ ID NO: 20099 - DNA, 21 bp, Homo sapiens
tgggttagackagcaggcagg

SEQ ID NO: 20100 - DNA, 21 bp, Homo sapiens
aaggtacaaaracatgtggat

SEQ ID NO: 20101 - DNA, 21 bp, Homo sapiens
ccaccattttyggcttagcct

SEQ ID NO: 20102 - DNA, 21 bp, Homo sapiens
agggagtctaytaacaggtct

SEQ ID NO: 20103 - DNA, 21 bp, Homo sapiens
aatgtgctatytcctcgacct

SEQ ID NO: 20104 - DNA, 21 bp, Homo sapiens
aagtagaaaakctcaaacatc

SEQ ID NO: 20105 - DNA, 21 bp, Homo sapiens
cagatagtacrgggaagacac

SEQ ID NO: 20106 - DNA, 21 bp, Homo sapiens
gcagtgctttrcacaaagtat

SEQ ID NO: 20107 - DNA, 21 bp, Homo sapiens
ccttcatcagrggctttcaga

SEQ ID NO: 20108 - DNA, 21 bp, Homo sapiens
gaacagaaaaygtttttaggc

SEQ ID NO: 20109 - DNA, 21 bp, Homo sapiens
gaaattactayggcaagcaac

SEQ ID NO: 20110 - DNA, 21 bp, Homo sapiens
gaaacaaaaargcttaatcct

SEQ ID NO: 20111 - DNA, 21 bp, Homo sapiens
cacaacgaatrgagaaaaatg

SEQ ID NO: 20112 - DNA, 21 bp, Homo sapiens
tcttccacatwttcttacttc

SEQ ID NO: 20113 - DNA, 21 bp, Homo sapiens
catgctttatwttttcacagc

SEQ ID NO: 20114 - DNA, 21 bp, Homo sapiens
atatgaacacrtgaaagccca

SEQ ID NO: 20115 - DNA, 21 bp, Homo sapiens
tagagttaccrgggaacatcc

SEQ ID NO: 20116 - DNA, 21 bp, Homo sapiens
ctcggcagccycaggcagctt

SEQ ID NO: 20117 - DNA, 21 bp, Homo sapiens
gtgacctttaytgtctcctca

SEQ ID NO: 20118 - DNA, 21 bp, Homo sapiens
cagtgcaaacraggcaaaatg

SEQ ID NO: 20119 - DNA, 21 bp, Homo sapiens
gattaataatrgaagttatat

SEQ ID NO: 20120 - DNA, 21 bp, Homo sapiens
gatgtatagakagtcaagatt

SEQ ID NO: 20121 - DNA, 21 bp, Homo sapiens
aattttggcaycaacataaag

SEQ ID NO: 20122 - DNA, 21 bp, Homo sapiens
caatccttatyaatttaaagt

SEQ ID NO: 20123 - DNA, 21 bp, Homo sapiens
atttgatgtaytaagtcaaga

SEQ ID NO: 20124 - DNA, 21 bp, Homo sapiens
ctagtaaattyggcaagaaaa

SEQ ID NO: 20125 - DNA, 21 bp, Homo sapiens
tggtcagtaaygtattaatta

SEQ ID NO: 20126 - DNA, 21 bp, Homo sapiens
acttgattggrtaggatttaa

SEQ ID NO: 20127 - DNA, 21 bp, Homo sapiens
ctgacctacaratacactcat

SEQ ID NO: 20128 - DNA, 21 bp, Homo sapiens
ttatttaggasgttgctgatc

SEQ ID NO: 20129 - DNA, 21 bp, Homo sapiens
gcctaaccatycctgaataat

SEQ ID NO: 20130 - DNA, 21 bp, Homo sapiens
catgggtaaarcacagcttaa

SEQ ID NO: 20131 - DNA, 21 bp, Homo sapiens
gctaacttggmatcagagagg

SEQ ID NO: 20132 - DNA, 21 bp, Homo sapiens
tacagctttcmataaggacac

SEQ ID NO: 20133 - DNA, 21 bp, Homo sapiens
ctgaaataagwtattgagctg

SEQ ID NO: 20134 - DNA, 21 bp, Homo sapiens
accttgacctktttccaaatc

SEQ ID NO: 20135 - DNA, 21 bp, Homo sapiens
aaaagtttttyctgagtctgt

SEQ ID NO: 20136 - DNA, 21 bp, Homo sapiens
attggtccccytataagagga

SEQ ID NO: 20137 - DNA, 21 bp, Homo sapiens
tctctcagttsatacgtcaga

SEQ ID NO: 20138 - DNA, 21 bp, Homo sapiens
aacctagactsagcctttatt

SEQ ID NO: 20139 - DNA, 21 bp, Homo sapiens
agttggtataygcagtgctta

SEQ ID NO: 20140 - DNA, 21 bp, Homo sapiens
gtttttatctyttggacttat

SEQ ID NO: 20141 - DNA, 21 bp, Homo sapiens
gaatttgagakagcttcttga

SEQ ID NO: 20142 - DNA, 21 bp, Homo sapiens
cagcaccaggmtttccataaa

SEQ ID NO: 20143 - DNA, 21 bp, Homo sapiens
actaggaaagracatgacttg

SEQ ID NO: 20144 - DNA, 21 bp, Homo sapiens
gaaacattgcwgccctgaatt

SEQ ID NO: 20145 - DNA, 21 bp, Homo sapiens
atgcaaagtgwtcaagatatt

SEQ ID NO: 20146 - DNA, 21 bp, Homo sapiens
agtccatcatrcaaagggaaa

SEQ ID NO: 20147 - DNA, 21 bp, Homo sapiens
tgagttacagkttgcgattta

SEQ ID NO: 20148 - DNA, 21 bp, Homo sapiens
gtgtgtcccarttgtaaatct

SEQ ID NO: 20149 - DNA, 21 bp, Homo sapiens
gagatgaatgwcataggtgta

SEQ ID NO: 20150 - DNA, 21 bp, Homo sapiens
cccagattttyctgtgccaat

SEQ ID NO: 20151 - DNA, 21 bp, Homo sapiens
cagatgcagaygtagtgactg

SEQ ID NO: 20152 - DNA, 21 bp, Homo sapiens
aaaagaaaatytggaagaaag

SEQ ID NO: 20153 - DNA, 21 bp, Homo sapiens
gcatacttgcrtaattgtttt

SEQ ID NO: 20154 - DNA, 21 bp, Homo sapiens
accccaggggwagtgttgatt

SEQ ID NO: 20155 - DNA, 21 bp, Homo sapiens
aaaagttgatrttaatcttcc

SEQ ID NO: 20156 - DNA, 21 bp, Homo sapiens
tttactatgaygctaaaaata

SEQ ID NO: 20157 - DNA, 21 bp, Homo sapiens
taatttaagcyctatttgaat

SEQ ID NO: 20158 - DNA, 21 bp, Homo sapiens
acattgaagaycagtcctatt

SEQ ID NO: 20159 - DNA, 21 bp, Homo sapiens
agaaattttcraatgtatcat

SEQ ID NO: 20160 - DNA, 21 bp, Homo sapiens
tataacaaaaytgataggcaa

SEQ ID NO: 20161 - DNA, 21 bp, Homo sapiens
ttgggatggcrccaaacacaa

SEQ ID NO: 20162 - DNA, 21 bp, Homo sapiens
tgacatgtaawgaaacaataa

SEQ ID NO: 20163 - DNA, 21 bp, Homo sapiens
gcttagacaartgccaaagaa

SEQ ID NO: 20164 - DNA, 21 bp, Homo sapiens
atcgaaattcraattcttggg

SEQ ID NO: 20165 - DNA, 21 bp, Homo sapiens
tgtctaaaagktttctctccg

SEQ ID NO: 20166 - DNA, 21 bp, Homo sapiens
atagctctagrtccatgggca

SEQ ID NO: 20167 - DNA, 21 bp, Homo sapiens
gaggtaaactsaagcgctgaa

SEQ ID NO: 20168 - DNA, 21 bp, Homo sapiens
tacagagggtrtaaaaagcat

SEQ ID NO: 20169 - DNA, 21 bp, Homo sapiens
ttatatctgayggaatgagta

SEQ ID NO: 20170 - DNA, 21 bp, Homo sapiens
tgtttactatkatttatgata

SEQ ID NO: 20171 - DNA, 21 bp, Homo sapiens
ttagctgaggmtcattctgct

SEQ ID NO: 20172 - DNA, 21 bp, Homo sapiens
tatctttaaawggttggcaaa

SEQ ID NO: 20173 - DNA, 21 bp, Homo sapiens
agagtgtactygtaaaccttt

SEQ ID NO: 20174 - DNA, 21 bp, Homo sapiens
aaaaattacamcccatgcttc

SEQ ID NO: 20175 - DNA, 21 bp, Homo sapiens
tataacattartctcacaatt

SEQ ID NO: 20176 - DNA, 21 bp, Homo sapiens
gcaccacatakcctgcatttt

SEQ ID NO: 20177 - DNA, 21 bp, Homo sapiens
cacacttttakgtttcagtcc

SEQ ID NO: 20178 - DNA, 21 bp, Homo sapiens
gaatggaggcractattttta

SEQ ID NO: 20179 - DNA, 21 bp, Homo sapiens
aacatagtgawacaggtacca

SEQ ID NO: 20180 - DNA, 21 bp, Homo sapiens
gagcaggaatrgtattgaaat

SEQ ID NO: 20181 - DNA, 21 bp, Homo sapiens
ctgtaaatgcsgaaggtgtga

SEQ ID NO: 20182 - DNA, 21 bp, Homo sapiens
gttatcatgakgtctgctgat

SEQ ID NO: 20183 - DNA, 21 bp, Homo sapiens
atattcttacwttgtacctaa

SEQ ID NO: 20184 - DNA, 21 bp, Homo sapiens
aatttacagayttaatgatgc

SEQ ID NO: 20185 - DNA, 21 bp, Homo sapiens
cagcttcgctrtaatctctta

SEQ ID NO: 20186 - DNA, 21 bp, Homo sapiens
gtctccattgycaatgaaatt

SEQ ID NO: 20187 - DNA, 21 bp, Homo sapiens
ggatacttatyaaatttgtct

SEQ ID NO: 20188 - DNA, 21 bp, Homo sapiens
ctgctgatttmtccacctgtt

SEQ ID NO: 20189 - DNA, 21 bp, Homo sapiens
tgcattacaaraggatacaac

SEQ ID NO: 20190 - DNA, 21 bp, Homo sapiens
aattcattacrtagagtcatt

SEQ ID NO: 20191 - DNA, 21 bp, Homo sapiens
aatcttaaacmgtaggaagga

SEQ ID NO: 20192 - DNA, 21 bp, Homo sapiens
ggaaaaaattwgataaagatg

SEQ ID NO: 20193 - DNA, 21 bp, Homo sapiens
caccttttaawccttagtcat

SEQ ID NO: 20194 - DNA, 21 bp, Homo sapiens
tttgataactstaagtgtatt

SEQ ID NO: 20195 - DNA, 21 bp, Homo sapiens
agtaaacaacycccgactgta

SEQ ID NO: 20196 - DNA, 21 bp, Homo sapiens
tttaattcagyaaatctacgt

SEQ ID NO: 20197 - DNA, 21 bp, Homo sapiens
gatgggcttayttgtattatt

SEQ ID NO: 20198 - DNA, 21 bp, Homo sapiens
atgtggataayagggtattgt

SEQ ID NO: 20199 - DNA, 21 bp, Homo sapiens
tattggccatsgggttcttgt

SEQ ID NO: 20200 - DNA, 21 bp, Homo sapiens
ctaggtgtaaragataagtta

SEQ ID NO: 20201 - DNA, 21 bp, Homo sapiens
cagcatctttrcctaaaaatg

SEQ ID NO: 20202 - DNA, 21 bp, Homo sapiens
gcagatgaccrtgttgttcct

SEQ ID NO: 20203 - DNA, 21 bp, Homo sapiens
ataactctttytgccaacagc

SEQ ID NO: 20204 - DNA, 21 bp, Homo sapiens
tgtctttctasttctgagctt

SEQ ID NO: 20205 - DNA, 21 bp, Homo sapiens
tggacaactgytttgcaattc

SEQ ID NO: 20206 - DNA, 21 bp, Homo sapiens
gagtcatgtawtatctatcag

SEQ ID NO: 20207 - DNA, 21 bp, Homo sapiens
tactggaaccmtatctcaggc

SEQ ID NO: 20208 - DNA, 21 bp, Homo sapiens
aaggatggtgwcttcacacgc

SEQ ID NO: 20209 - DNA, 21 bp, Homo sapiens
tgagatagaarcagtctgatc

SEQ ID NO: 20210 - DNA, 21 bp, Homo sapiens
tgatgatctcygatgaagaag

SEQ ID NO: 20211 - DNA, 21 bp, Homo sapiens
catttaggccraggccatggg

SEQ ID NO: 20212 - DNA, 21 bp, Homo sapiens
ataataaaaaraagagtgtct

SEQ ID NO: 20213 - DNA, 21 bp, Homo sapiens
catttacttcyaacataacaa

SEQ ID NO: 20214 - DNA, 21 bp, Homo sapiens
tagtcttgtasttgaaatgta

SEQ ID NO: 20215 - DNA, 21 bp, Homo sapiens
ataaaccatastaagccaaaa

SEQ ID NO: 20216 - DNA, 21 bp, Homo sapiens
gaagccaccastaacaaaaga

SEQ ID NO: 20217 - DNA, 21 bp, Homo sapiens
aaaaagtccarttggagcttc

SEQ ID NO: 20218 - DNA, 21 bp, Homo sapiens
agccagaatcyatgagtgtgt

SEQ ID NO: 20219 - DNA, 21 bp, Homo sapiens
ttctgcctgtyctctgcatgt

SEQ ID NO: 20220 - DNA, 21 bp, Homo sapiens
tgctaagtctrcatccataaa

SEQ ID NO: 20221 - DNA, 21 bp, Homo sapiens
gaattgttttmtagatttctg

SEQ ID NO: 20222 - DNA, 21 bp, Homo sapiens
gatattgtgcmtcaatcctga

SEQ ID NO: 20223 - DNA, 21 bp, Homo sapiens
ctacaaactcygattagctac

SEQ ID NO: 20224 - DNA, 21 bp, Homo sapiens
tccctgggatrgagccctggg

SEQ ID NO: 20225 - DNA, 21 bp, Homo sapiens
ggttgaaatasgtaggaaagt

SEQ ID NO: 20226 - DNA, 21 bp, Homo sapiens
aatatatgtayacacatacat

SEQ ID NO: 20227 - DNA, 21 bp, Homo sapiens
tgatcagatasgttaccataa

SEQ ID NO: 20228 - DNA, 21 bp, Homo sapiens
ctttatgactscttgacacat

SEQ ID NO: 20229 - DNA, 21 bp, Homo sapiens
tatttaagtawatataaatgg

SEQ ID NO: 20230 - DNA, 21 bp, Homo sapiens
gatgtgattgrtatagctgca

SEQ ID NO: 20231 - DNA, 21 bp, Homo sapiens
agcaggctgcrgctgaagtgc

SEQ ID NO: 20232 - DNA, 21 bp, Homo sapiens
gatgctaatgyagccgctcag

SEQ ID NO: 20233 - DNA, 21 bp, Homo sapiens
catccatgtcrcatctgcctt

SEQ ID NO: 20234 - DNA, 21 bp, Homo sapiens
cattaacaaawccatgcaaaa

SEQ ID NO: 20235 - DNA, 21 bp, Homo sapiens
cacccattgcyatagcttgta

SEQ ID NO: 20236 - DNA, 21 bp, Homo sapiens
gagctatgtcraaagaaatgc

SEQ ID NO: 20237 - DNA, 21 bp, Homo sapiens
ggccgtcttasaaggcaggag

SEQ ID NO: 20238 - DNA, 21 bp, Homo sapiens
ctttccctgcyttttcagact

SEQ ID NO: 20239 - DNA, 21 bp, Homo sapiens
cattaacctcycctggctgtt

SEQ ID NO: 20240 - DNA, 21 bp, Homo sapiens
tagagaggcasagacccagag

SEQ ID NO: 20241 - DNA, 21 bp, Homo sapiens
ttactggcttrttttaggttt

SEQ ID NO: 20242 - DNA, 21 bp, Homo sapiens
gctctctatcyctttatctgg

SEQ ID NO: 20243 - DNA, 21 bp, Homo sapiens
agctgaaagtkctggagtcag

SEQ ID NO: 20244 - DNA, 21 bp, Homo sapiens
gttgacagatycaatttttgc

SEQ ID NO: 20245 - DNA, 21 bp, Homo sapiens
gaagcaaaagwtgaataaagg

SEQ ID NO: 20246 - DNA, 21 bp, Homo sapiens
caagatgggcratatgaccct

SEQ ID NO: 20247 - DNA, 21 bp, Homo sapiens
agaccaaattrcagagcacat

SEQ ID NO: 20248 - DNA, 21 bp, Homo sapiens
tgccaactaayacaaacattt

SEQ ID NO: 20249 - DNA, 21 bp, Homo sapiens
tgatctactgygctcttgctg

SEQ ID NO: 20250 - DNA, 21 bp, Homo sapiens
attcccatgcrtatctgtagt

SEQ ID NO: 20251 - DNA, 21 bp, Homo sapiens
tcaggacttakacatgtattt

SEQ ID NO: 20252 - DNA, 21 bp, Homo sapiens
tgctctctctrtggttagtgt

SEQ ID NO: 20253 - DNA, 21 bp, Homo sapiens
tatgtgtaacktccaatatat

SEQ ID NO: 20254 - DNA, 21 bp, Homo sapiens
ctatagccaayaaagactcac

SEQ ID NO: 20255 - DNA, 21 bp, Homo sapiens
atcagcagctyagagtaagtg

SEQ ID NO: 20256 - DNA, 21 bp, Homo sapiens
tcttcagcatsagctgaagcc

SEQ ID NO: 20257 - DNA, 21 bp, Homo sapiens
gacatagcacwctagtccact

SEQ ID NO: 20258 - DNA, 21 bp, Homo sapiens
cacgcattcasacttccttta

SEQ ID NO: 20259 - DNA, 21 bp, Homo sapiens
agtccagctgmtttgttcata

SEQ ID NO: 20260 - DNA, 21 bp, Homo sapiens
attttgtaaarcacacccgaa

SEQ ID NO: 20261 - DNA, 21 bp, Homo sapiens
ccttctctgamattccagaca

SEQ ID NO: 20262 - DNA, 21 bp, Homo sapiens
atctttcccawgccaataatt

SEQ ID NO: 20263 - DNA, 21 bp, Homo sapiens
tctccagtgcrtttctaaacc

SEQ ID NO: 20264 - DNA, 21 bp, Homo sapiens
acagggacgtrtactaggaca

SEQ ID NO: 20265 - DNA, 21 bp, Homo sapiens
agcaaaatttkcagttgtttt

SEQ ID NO: 20266 - DNA, 21 bp, Homo sapiens
ctagtcctcarttgtcccttt

SEQ ID NO: 20267 - DNA, 21 bp, Homo sapiens
ccatcaattgrtgcagtgaca

SEQ ID NO: 20268 - DNA, 21 bp, Homo sapiens
aaaagacatawgagcaagtaa

SEQ ID NO: 20269 - DNA, 21 bp, Homo sapiens
cttattttcartgtaagtttt

SEQ ID NO: 20270 - DNA, 21 bp, Homo sapiens
aagactttttsagttactgat

SEQ ID NO: 20271 - DNA, 21 bp, Homo sapiens
ggaaatgtcarattccaacaa

SEQ ID NO: 20272 - DNA, 21 bp, Homo sapiens
atttgtttagktagtgcatag

SEQ ID NO: 20273 - DNA, 21 bp, Homo sapiens
gttgttagagrgtggaatcca

SEQ ID NO: 20274 - DNA, 21 bp, Homo sapiens
tacaaggttgsgtactgggtt

SEQ ID NO: 20275 - DNA, 21 bp, Homo sapiens
accttaaactkccacaaagac

SEQ ID NO: 20276 - DNA, 21 bp, Homo sapiens
cctgagagagmtaatccccaa

SEQ ID NO: 20277 - DNA, 21 bp, Homo sapiens
agcctgaacamtttaaaacat

SEQ ID NO: 20278 - DNA, 21 bp, Homo sapiens
actacaactaraatagttttg

SEQ ID NO: 20279 - DNA, 21 bp, Homo sapiens
aagattgcagmgtataagaag

SEQ ID NO: 20280 - DNA, 21 bp, Homo sapiens
cttgctgatartaattttctt

SEQ ID NO: 20281 - DNA, 21 bp, Homo sapiens
acttgtattaktcaacttctt

SEQ ID NO: 20282 - DNA, 21 bp, Homo sapiens
aggaaagggaycaaatgtttt

SEQ ID NO: 20283 - DNA, 21 bp, Homo sapiens
ttgacgcaccrtatgtaactc

SEQ ID NO: 20284 - DNA, 21 bp, Homo sapiens
acgcatgatcycctcctacca

SEQ ID NO: 20285 - DNA, 21 bp, Homo sapiens
gatgctttccygttcacatgg

SEQ ID NO: 20286 - DNA, 21 bp, Homo sapiens
gaagcacaaartggttgtaca

SEQ ID NO: 20287 - DNA, 21 bp, Homo sapiens
aaaagaatgartctcagcatc

SEQ ID NO: 20288 - DNA, 21 bp, Homo sapiens
gtggagacacrtcagaccaac

SEQ ID NO: 20289 - DNA, 21 bp, Homo sapiens
cctattctccrtctgagaagt

SEQ ID NO: 20290 - DNA, 21 bp, Homo sapiens
aagccttggasaggccataca

SEQ ID NO: 20291 - DNA, 21 bp, Homo sapiens
ggggcttcctycttggttttc

SEQ ID NO: 20292 - DNA, 21 bp, Homo sapiens
aggagagaatyagaccagaaa

SEQ ID NO: 20293 - DNA, 21 bp, Homo sapiens
ctttgaaatgkgctcagtagc

SEQ ID NO: 20294 - DNA, 21 bp, Homo sapiens
agagaatccaytcaaacatca

SEQ ID NO: 20295 - DNA, 21 bp, Homo sapiens
tctttacctcrtatagtcatt

SEQ ID NO: 20296 - DNA, 21 bp, Homo sapiens
acagaattcawcagaaggcat

SEQ ID NO: 20297 - DNA, 21 bp, Homo sapiens
tacccagtttyattgttgctc

SEQ ID NO: 20298 - DNA, 21 bp, Homo sapiens
cagatgaccayggcctggagc

SEQ ID NO: 20299 - DNA, 21 bp, Homo sapiens
gcaccaactcsgatcatcaga

SEQ ID NO: 20300 - DNA, 21 bp, Homo sapiens
gcagctgtccrggtggaattc

SEQ ID NO: 20301 - DNA, 21 bp, Homo sapiens
tgagggagagmagatgctgac

SEQ ID NO: 20302 - DNA, 21 bp, Homo sapiens
ttattggagcygactctgcct

SEQ ID NO: 20303 - DNA, 21 bp, Homo sapiens
aagttctgcartcatctctgc

SEQ ID NO: 20304 - DNA, 21 bp, Homo sapiens
gcattgttgcmtaaagtgccc

SEQ ID NO: 20305 - DNA, 21 bp, Homo sapiens
cacattaaaayagtacccagc

SEQ ID NO: 20306 - DNA, 21 bp, Homo sapiens
ataagccatcsaataagcaaa

SEQ ID NO: 20307 - DNA, 21 bp, Homo sapiens
gtgactgatgktctattttca

SEQ ID NO: 20308 - DNA, 21 bp, Homo sapiens
attggtctatwttttatgctt

SEQ ID NO: 20309 - DNA, 21 bp, Homo sapiens
gcatgaagtaraaagcaaaaa

SEQ ID NO: 20310 - DNA, 21 bp, Homo sapiens
ccttgaaaaakgttgctaaaa

SEQ ID NO: 20311 - DNA, 21 bp, Homo sapiens
taggtgctcamatttgcttga

SEQ ID NO: 20312 - DNA, 21 bp, Homo sapiens
tggatggatcygtatcattat

SEQ ID NO: 20313 - DNA, 21 bp, Homo sapiens
gagtacctttstgatctcaga

SEQ ID NO: 20314 - DNA, 21 bp, Homo sapiens
attcctactastgttgactta

SEQ ID NO: 20315 - DNA, 21 bp, Homo sapiens
tactacatgcyaggaacagtg

SEQ ID NO: 20316 - DNA, 21 bp, Homo sapiens
tcaaccttgaygagcaaaccc

SEQ ID NO: 20317 - DNA, 21 bp, Homo sapiens
gggcaatcccsaggctcagta

SEQ ID NO: 20318 - DNA, 21 bp, Homo sapiens
ttctgaactgmgtctacaatt

SEQ ID NO: 20319 - DNA, 21 bp, Homo sapiens
caaacttaaasaagttcacat

SEQ ID NO: 20320 - DNA, 21 bp, Homo sapiens
agtcaatccgygttcatcacc

SEQ ID NO: 20321 - DNA, 21 bp, Homo sapiens
gacacaacacrgtataagagc

SEQ ID NO: 20322 - DNA, 21 bp, Homo sapiens
agttctcctaygtggtcagag

SEQ ID NO: 20323 - DNA, 21 bp, Homo sapiens
tttgagtcttkgtttccttgc

SEQ ID NO: 20324 - DNA, 21 bp, Homo sapiens
actttcgattytccagaggac

SEQ ID NO: 20325 - DNA, 21 bp, Homo sapiens
cataaccacaygcccatacta

SEQ ID NO: 20326 - DNA, 21 bp, Homo sapiens
atagttccgayggctggagaa

SEQ ID NO: 20327 - DNA, 21 bp, Homo sapiens
gctggaaaccracacaccaag

SEQ ID NO: 20328 - DNA, 21 bp, Homo sapiens
gacccagaacrctttgtctaa

SEQ ID NO: 20329 - DNA, 21 bp, Homo sapiens
tcccaatctaygctatcctct

SEQ ID NO: 20330 - DNA, 21 bp, Homo sapiens
ctatgacataygcctagaatt

SEQ ID NO: 20331 - DNA, 21 bp, Homo sapiens
cgcttctgagrtggttcttct

SEQ ID NO: 20332 - DNA, 21 bp, Homo sapiens
attctgtgacraaggtgtttt

SEQ ID NO: 20333 - DNA, 21 bp, Homo sapiens
attgcgtgacrtgaacgtgac

SEQ ID NO: 20334 - DNA, 21 bp, Homo sapiens
cattcacgcaytcattcattg

SEQ ID NO: 20335 - DNA, 21 bp, Homo sapiens
ggttcacttaytcccttccag

SEQ ID NO: 20336 - DNA, 21 bp, Homo sapiens
cagatgcatgycataaataaa

SEQ ID NO: 20337 - DNA, 21 bp, Homo sapiens
aggacttaagraagcagattg

SEQ ID NO: 20338 - DNA, 21 bp, Homo sapiens
tgggccatgcrttctcttgaa

SEQ ID NO: 20339 - DNA, 21 bp, Homo sapiens
cttgcttgctwtatacactca

SEQ ID NO: 20340 - DNA, 21 bp, Homo sapiens
ttattactgaygatctcacta

SEQ ID NO: 20341 - DNA, 21 bp, Homo sapiens
ctgcagagtgkagacttaaat

SEQ ID NO: 20342 - DNA, 21 bp, Homo sapiens
ttaataatatscgggtgatgt

SEQ ID NO: 20343 - DNA, 21 bp, Homo sapiens
tctttgctggygttaagatga

SEQ ID NO: 20344 - DNA, 21 bp, Homo sapiens
ttaccaaatcrtcatctccag

SEQ ID NO: 20345 - DNA, 21 bp, Homo sapiens
gagactccacmtagcctacac

SEQ ID NO: 20346 - DNA, 21 bp, Homo sapiens
catgcaagaayggcaggatat

SEQ ID NO: 20347 - DNA, 21 bp, Homo sapiens
gtgaagcagaygctggaccta

SEQ ID NO: 20348 - DNA, 21 bp, Homo sapiens
ataggagcccwcttcccatgt

SEQ ID NO: 20349 - DNA, 21 bp, Homo sapiens
caatgaaaccwcccatctaag

SEQ ID NO: 20350 - DNA, 21 bp, Homo sapiens
atataaccttycgtggtaagt

SEQ ID NO: 20351 - DNA, 21 bp, Homo sapiens
aaattataaawctacatagta

SEQ ID NO: 20352 - DNA, 21 bp, Homo sapiens
gggggaaaaayagaattccac

SEQ ID NO: 20353 - DNA, 21 bp, Homo sapiens
gacctcagagmaaataggagt

SEQ ID NO: 20354 - DNA, 21 bp, Homo sapiens
acatcaatgcyagaatgatat

SEQ ID NO: 20355 - DNA, 21 bp, Homo sapiens
taactgctgcyttgtaagaac

SEQ ID NO: 20356 - DNA, 21 bp, Homo sapiens
cgttcccatasacaatagcaa

SEQ ID NO: 20357 - DNA, 21 bp, Homo sapiens
atataaaaaaygaaacccaaa

SEQ ID NO: 20358 - DNA, 21 bp, Homo sapiens
cctaattcatytattactatg

SEQ ID NO: 20359 - DNA, 21 bp, Homo sapiens
tgatcatcttyatgtactagt

SEQ ID NO: 20360 - DNA, 21 bp, Homo sapiens
ctaccattctrctatgggaac

SEQ ID NO: 20361 - DNA, 21 bp, Homo sapiens
ttccttagtaytttggcaaca

SEQ ID NO: 20362 - DNA, 21 bp, Homo sapiens
actgtgcataracagtgttca

SEQ ID NO: 20363 - DNA, 21 bp, Homo sapiens
atattaggacrttcaatatgt

SEQ ID NO: 20364 - DNA, 21 bp, Homo sapiens
tgtgcaaatayttttccctaa

SEQ ID NO: 20365 - DNA, 21 bp, Homo sapiens
tcatctctcamagcaagacaa

SEQ ID NO: 20366 - DNA, 21 bp, Homo sapiens
acaggccgtargatttttcct

SEQ ID NO: 20367 - DNA, 21 bp, Homo sapiens
atgatctaccrtatgtctcca

SEQ ID NO: 20368 - DNA, 21 bp, Homo sapiens
aagtcctgccytcaaaaaccc

SEQ ID NO: 20369 - DNA, 21 bp, Homo sapiens
tgcacatccayaccctgtggg

SEQ ID NO: 20370 - DNA, 21 bp, Homo sapiens
ggtttacaacygcagatggcc

SEQ ID NO: 20371 - DNA, 21 bp, Homo sapiens
tgcacctattrcttttttata

SEQ ID NO: 20372 - DNA, 21 bp, Homo sapiens
caatatttccrtaccgaaacc

SEQ ID NO: 20373 - DNA, 21 bp, Homo sapiens
gcattcacttscaagagtgtc

SEQ ID NO: 20374 - DNA, 21 bp, Homo sapiens
taactctatgygcactacttg

SEQ ID NO: 20375 - DNA, 21 bp, Homo sapiens
aaggaacgtartcagggcaag

SEQ ID NO: 20376 - DNA, 21 bp, Homo sapiens
cagcacctccwtcttgggcac

SEQ ID NO: 20377 - DNA, 21 bp, Homo sapiens
taaaataatgrtggagacata

SEQ ID NO: 20378 - DNA, 21 bp, Homo sapiens
ggaaaaaaaaratcactgtca

SEQ ID NO: 20379 - DNA, 21 bp, Homo sapiens
attagaaagcmtgcagggtta

SEQ ID NO: 20380 - DNA, 21 bp, Homo sapiens
tgccccaactraatccatggc

SEQ ID NO: 20381 - DNA, 21 bp, Homo sapiens
acagtgacttmtcatatttta

SEQ ID NO: 20382 - DNA, 21 bp, Homo sapiens
ccttttgtagragctaaattt

SEQ ID NO: 20383 - DNA, 21 bp, Homo sapiens
acaggagaaartcatgcactg

SEQ ID NO: 20384 - DNA, 21 bp, Homo sapiens
tatcagcatcrgttctttgtg

SEQ ID NO: 20385 - DNA, 21 bp, Homo sapiens
gaactggattmaattttcttc

SEQ ID NO: 20386 - DNA, 21 bp, Homo sapiens
tgtctaagtgkcttatctgat

SEQ ID NO: 20387 - DNA, 21 bp, Homo sapiens
aaaaaatggayctcaaatact

SEQ ID NO: 20388 - DNA, 21 bp, Homo sapiens
aatctcagctscctccactct

SEQ ID NO: 20389 - DNA, 21 bp, Homo sapiens
tctaggaaackgtggcttggt

SEQ ID NO: 20390 - DNA, 21 bp, Homo sapiens
ttgttagtcartctcagcaca

SEQ ID NO: 20391 - DNA, 21 bp, Homo sapiens
tctgaatccargacttgaaag

SEQ ID NO: 20392 - DNA, 21 bp, Homo sapiens
atcaaattgtytacagatctt

SEQ ID NO: 20393 - DNA, 21 bp, Homo sapiens
tgctgtgatayggctttctag

SEQ ID NO: 20394 - DNA, 21 bp, Homo sapiens
gcaacggcccstagaaattcg

SEQ ID NO: 20395 - DNA, 21 bp, Homo sapiens
aatagcaccaytgcgattctg

SEQ ID NO: 20396 - DNA, 21 bp, Homo sapiens
cctggaagatrtgtcatagat

SEQ ID NO: 20397 - DNA, 21 bp, Homo sapiens
taaacgattcrgattccttac

SEQ ID NO: 20398 - DNA, 21 bp, Homo sapiens
tgagaaacgarttacaactac

SEQ ID NO: 20399 - DNA, 21 bp, Homo sapiens
gtgctaaaagrcgcacatcct

SEQ ID NO: 20400 - DNA, 21 bp, Homo sapiens
tgcaatcaaaygttatatgta

SEQ ID NO: 20401 - DNA, 21 bp, Homo sapiens
aaagctgttgkgagtcattta

SEQ ID NO: 20402 - DNA, 21 bp, Homo sapiens
cctaatgatawttaaatccct

SEQ ID NO: 20403 - DNA, 21 bp, Homo sapiens
tccactttcasgtcttctgtt

SEQ ID NO: 20404 - DNA, 21 bp, Homo sapiens
ccttccctctycactcaggaa

SEQ ID NO: 20405 - DNA, 21 bp, Homo sapiens
aatatgtagaycagagcaaag

SEQ ID NO: 20406 - DNA, 21 bp, Homo sapiens
ccttgctaagrggccacctca

SEQ ID NO: 20407 - DNA, 21 bp, Homo sapiens
cacacttgaayatgtactgat

SEQ ID NO: 20408 - DNA, 21 bp, Homo sapiens
gatggccttcrgtccaaaagt

SEQ ID NO: 20409 - DNA, 21 bp, Homo sapiens
aaattacagayaagtggaatt

SEQ ID NO: 20410 - DNA, 21 bp, Homo sapiens
gcactcattgygtgaggttga

SEQ ID NO: 20411 - DNA, 21 bp, Homo sapiens
atgagaaagcrtacccatgcc

SEQ ID NO: 20412 - DNA, 21 bp, Homo sapiens
aggcaggagayattattaaga

SEQ ID NO: 20413 - DNA, 21 bp, Homo sapiens
ctgcgctgctraacatcacca

SEQ ID NO: 20414 - DNA, 21 bp, Homo sapiens
caatagtaaartgtgtcacca

SEQ ID NO: 20415 - DNA, 21 bp, Homo sapiens
attattagacrtgttggcatt

SEQ ID NO: 20416 - DNA, 21 bp, Homo sapiens
tatttttgagrctagaaattt

SEQ ID NO: 20417 - DNA, 21 bp, Homo sapiens
tggccatcctraacgccacag

SEQ ID NO: 20418 - DNA, 21 bp, Homo sapiens
attcacgctgyaacatgtgtg

SEQ ID NO: 20419 - DNA, 21 bp, Homo sapiens
tgctggggggrgcttggagac

SEQ ID NO: 20420 - DNA, 21 bp, Homo sapiens
cagggccatgygataaatcct

SEQ ID NO: 20421 - DNA, 21 bp, Homo sapiens
gcctggaaagstgtctccatg

SEQ ID NO: 20422 - DNA, 21 bp, Homo sapiens
acctggtgcayggggaccttt

SEQ ID NO: 20423 - DNA, 21 bp, Homo sapiens
ctgaccaccckcgagtgctgc

SEQ ID NO: 20424 - DNA, 21 bp, Homo sapiens
tggatggtcayggagaaggta

SEQ ID NO: 20425 - DNA, 21 bp, Homo sapiens
caaaacctcayagtttcacct

SEQ ID NO: 20426 - DNA, 21 bp, Homo sapiens
cataaggagamccccccaccc

SEQ ID NO: 20427 - DNA, 21 bp, Homo sapiens
gtgcaccggaygctcctttct

SEQ ID NO: 20428 - DNA, 21 bp, Homo sapiens
acccacacagwaactacagat

SEQ ID NO: 20429 - DNA, 21 bp, Homo sapiens
ggcggctggcyggggcgggat

SEQ ID NO: 20430 - DNA, 21 bp, Homo sapiens
ctgttacccarggatgcttct

SEQ ID NO: 20431 - DNA, 21 bp, Homo sapiens
catattatcasttaataatct

SEQ ID NO: 20432 - DNA, 21 bp, Homo sapiens
ctggtcttccrtgtctactgt

SEQ ID NO: 20433 - DNA, 21 bp, Homo sapiens
agccattctcmctttgtctta

SEQ ID NO: 20434 - DNA, 21 bp, Homo sapiens
cttctagctcrtgcagtgtag

SEQ ID NO: 20435 - DNA, 21 bp, Homo sapiens
gcagctgttcyttattcataa

SEQ ID NO: 20436 - DNA, 21 bp, Homo sapiens
acactgacagyggaaggatca

SEQ ID NO: 20437 - DNA, 21 bp, Homo sapiens
gcaaaactatrtacaccactg

SEQ ID NO: 20438 - DNA, 21 bp, Homo sapiens
cctcggaacartactccacca

SEQ ID NO: 20439 - DNA, 21 bp, Homo sapiens
tcaaactctcygctcatttca

SEQ ID NO: 20440 - DNA, 21 bp, Homo sapiens
tgccctgattrgcagtgatta

SEQ ID NO: 20441 - DNA, 21 bp, Homo sapiens
cctgagctctygcctgtcctc

SEQ ID NO: 20442 - DNA, 21 bp, Homo sapiens
agctaacgctwaaaaacacag

SEQ ID NO: 20443 - DNA, 21 bp, Homo sapiens
aagaactcaaytgaccatcag

SEQ ID NO: 20444 - DNA, 21 bp, Homo sapiens
acacttcaaarcaacccaacc

SEQ ID NO: 20445 - DNA, 21 bp, Homo sapiens
tgttgtgggcrtagcgcaggg

SEQ ID NO: 20446 - DNA, 21 bp, Homo sapiens
acttgctttgraaagaagcca

SEQ ID NO: 20447 - DNA, 21 bp, Homo sapiens
gaaaagcgacragggctctcc

SEQ ID NO: 20448 - DNA, 21 bp, Homo sapiens
agccactgtayagagacaaga

SEQ ID NO: 20449 - DNA, 21 bp, Homo sapiens
tatgagacaasaagacagatg

SEQ ID NO: 20450 - DNA, 21 bp, Homo sapiens
tacagtgctgwggaaaaactg

SEQ ID NO: 20451 - DNA, 21 bp, Homo sapiens
gcaagctagtmagggaatctc

SEQ ID NO: 20452 - DNA, 21 bp, Homo sapiens
ccgaaaaaaawatatatatat

SEQ ID NO: 20453 - DNA, 21 bp, Homo sapiens
atccaggcttytattgcctct

SEQ ID NO: 20454 - DNA, 21 bp, Homo sapiens
ccaggtggggytcaaaatagt

SEQ ID NO: 20455 - DNA, 21 bp, Homo sapiens
ctactagcctrttcaatcgtg

SEQ ID NO: 20456 - DNA, 21 bp, Homo sapiens
ggacactggcraccagaacac

SEQ ID NO: 20457 - DNA, 21 bp, Homo sapiens
aataagtggtwatgaaaggtg

SEQ ID NO: 20458 - DNA, 21 bp, Homo sapiens
gagcaaaagaygagaaaaatt

SEQ ID NO: 20459 - DNA, 21 bp, Homo sapiens
tcctaggcacrgtgcatgagg

SEQ ID NO: 20460 - DNA, 21 bp, Homo sapiens
gaaagaaaccrtgttcatagg

SEQ ID NO: 20461 - DNA, 21 bp, Homo sapiens
cacacaacttyaggatgtaga

SEQ ID NO: 20462 - DNA, 21 bp, Homo sapiens
tcaattattaraaacttttat

SEQ ID NO: 20463 - DNA, 21 bp, Homo sapiens
tccaaccatartaactcatgc

SEQ ID NO: 20464 - DNA, 21 bp, Homo sapiens
gtaaatagaaraaagcagttt

SEQ ID NO: 20465 - DNA, 21 bp, Homo sapiens
gtggttcagakgcagaagttc

SEQ ID NO: 20466 - DNA, 21 bp, Homo sapiens
gaaatgtggamagggagaagg

SEQ ID NO: 20467 - DNA, 21 bp, Homo sapiens
gaaatgttcamaggaactcac

SEQ ID NO: 20468 - DNA, 21 bp, Homo sapiens
tattctgtacrctctggaaca

SEQ ID NO: 20469 - DNA, 21 bp, Homo sapiens
acaaggtcaastgaagaattc

SEQ ID NO: 20470 - DNA, 21 bp, Homo sapiens
ttccactttcrtatctagagg

SEQ ID NO: 20471 - DNA, 21 bp, Homo sapiens
atgagacaagmgctcagaaga

SEQ ID NO: 20472 - DNA, 21 bp, Homo sapiens
ctgtaaatggsgctaaaatct

SEQ ID NO: 20473 - DNA, 21 bp, Homo sapiens
gagcagagccrtttattttct

SEQ ID NO: 20474 - DNA, 21 bp, Homo sapiens
ttcatgatggkttagatgtcg

SEQ ID NO: 20475 - DNA, 21 bp, Homo sapiens
ctccacgcacsatttgccctt

SEQ ID NO: 20476 - DNA, 21 bp, Homo sapiens
atgtctgctcrccaaccagca

SEQ ID NO: 20477 - DNA, 21 bp, Homo sapiens
aagcccaactrttcaaaagtt

SEQ ID NO: 20478 - DNA, 21 bp, Homo sapiens
gaccctggctsaagaattcag

SEQ ID NO: 20479 - DNA, 21 bp, Homo sapiens
ccccaggaagkgcttgagatt

SEQ ID NO: 20480 - DNA, 21 bp, Homo sapiens
gtcctgtttaytcagtaaaac

SEQ ID NO: 20481 - DNA, 21 bp, Homo sapiens
ttgtcccagtygtaggctcgc

SEQ ID NO: 20482 - DNA, 21 bp, Homo sapiens
ggagcacaccyaatttcgtgc

SEQ ID NO: 20483 - DNA, 21 bp, Homo sapiens
atatcccaaartaagcagatt

SEQ ID NO: 20484 - DNA, 21 bp, Homo sapiens
ggaacctgttrtacccaagac

SEQ ID NO: 20485 - DNA, 21 bp, Homo sapiens
gttaaccacartgcttactag

SEQ ID NO: 20486 - DNA, 21 bp, Homo sapiens
gtgttcttgcrgtatacatgt

SEQ ID NO: 20487 - DNA, 21 bp, Homo sapiens
tgctgcctctycctgcagatc

SEQ ID NO: 20488 - DNA, 21 bp, Homo sapiens
aagccaaatawtcctctaggc

SEQ ID NO: 20489 - DNA, 21 bp, Homo sapiens
cttccccccamgttggcatag

SEQ ID NO: 20490 - DNA, 21 bp, Homo sapiens
tttgccactgyccttagatca

SEQ ID NO: 20491 - DNA, 21 bp, Homo sapiens
ccaaatcagasctagggtagg

SEQ ID NO: 20492 - DNA, 21 bp, Homo sapiens
aggaaatcttytgtggggaga

SEQ ID NO: 20493 - DNA, 21 bp, Homo sapiens
cccgtgtttcrtttaattact

SEQ ID NO: 20494 - DNA, 21 bp, Homo sapiens
aggcaggtgcrcattatccct

SEQ ID NO: 20495 - DNA, 21 bp, Homo sapiens
gtacttagcayactggccttt

SEQ ID NO: 20496 - DNA, 21 bp, Homo sapiens
cgttcagtacsaattattgtt

SEQ ID NO: 20497 - DNA, 21 bp, Homo sapiens
gccaaggatgwataaccaaac

SEQ ID NO: 20498 - DNA, 21 bp, Homo sapiens
tgcaaataagrcaaggcactg

SEQ ID NO: 20499 - DNA, 21 bp, Homo sapiens
taagaaatctsggtgggtcaa

SEQ ID NO: 20500 - DNA, 21 bp, Homo sapiens
gacatggaccmcttatggttt

SEQ ID NO: 20501 - DNA, 21 bp, Homo sapiens
gtatggtatcmatgaccaaga

SEQ ID NO: 20502 - DNA, 21 bp, Homo sapiens
tattttgaacraaccctccat

SEQ ID NO: 20503 - DNA, 21 bp, Homo sapiens
taaaaggagamatatatggaa

SEQ ID NO: 20504 - DNA, 21 bp, Homo sapiens
tgggtttctaygtgtggaaag

SEQ ID NO: 20505 - DNA, 21 bp, Homo sapiens
gagggacttarctttgtggtc

SEQ ID NO: 20506 - DNA, 21 bp, Homo sapiens
tgtagaataaygagttcaatg

SEQ ID NO: 20507 - DNA, 21 bp, Homo sapiens
ttataagtgtrtaagaatcat

SEQ ID NO: 20508 - DNA, 21 bp, Homo sapiens
ttcattgacayaaaaggagca

SEQ ID NO: 20509 - DNA, 21 bp, Homo sapiens
ttacaaggaawcctatgatga

SEQ ID NO: 20510 - DNA, 21 bp, Homo sapiens
gttctaggtamatacaataag

SEQ ID NO: 20511 - DNA, 21 bp, Homo sapiens
gaggatgaaaytgggaagtca

SEQ ID NO: 20512 - DNA, 21 bp, Homo sapiens
ttgagttggarttttttgtta

SEQ ID NO: 20513 - DNA, 21 bp, Homo sapiens
ctatgggcctycacaggttga

SEQ ID NO: 20514 - DNA, 21 bp, Homo sapiens
tgccaaggatrctagcttgga

SEQ ID NO: 20515 - DNA, 21 bp, Homo sapiens
aacatgtaaasctggatcaaa

SEQ ID NO: 20516 - DNA, 21 bp, Homo sapiens
tgggctttctmagttataaga

SEQ ID NO: 20517 - DNA, 21 bp, Homo sapiens
gggaacccaayggatagtagt

SEQ ID NO: 20518 - DNA, 21 bp, Homo sapiens
aattttctgayagtaaccatt

SEQ ID NO: 20519 - DNA, 21 bp, Homo sapiens
ctaagtgcttytggggcattc

SEQ ID NO: 20520 - DNA, 21 bp, Homo sapiens
taacccttgtwcatcagtata

SEQ ID NO: 20521 - DNA, 21 bp, Homo sapiens
atgcaaatggyagcgccagtc

SEQ ID NO: 20522 - DNA, 21 bp, Homo sapiens
tcaccaatgtrgatttttgtt

SEQ ID NO: 20523 - DNA, 21 bp, Homo sapiens
aatccatgtgygcagaactca

SEQ ID NO: 20524 - DNA, 21 bp, Homo sapiens
acgactaaagwgcaaagtaag

SEQ ID NO: 20525 - DNA, 21 bp, Homo sapiens
tgaacctgctkttgctgaaca

SEQ ID NO: 20526 - DNA, 21 bp, Homo sapiens
caagcactacsgaggcccaga

SEQ ID NO: 20527 - DNA, 21 bp, Homo sapiens
tttgcaatcaycacttgtaca

SEQ ID NO: 20528 - DNA, 21 bp, Homo sapiens
taaacacaccrctgggcaagt

SEQ ID NO: 20529 - DNA, 21 bp, Homo sapiens
aaattttgcaygcctttgctt

SEQ ID NO: 20530 - DNA, 21 bp, Homo sapiens
ctcatacatasaatttttgat

SEQ ID NO: 20531 - DNA, 21 bp, Homo sapiens
gtagctcccaytgcctgtttt

SEQ ID NO: 20532 - DNA, 21 bp, Homo sapiens
gggaggatctstattaaacca

SEQ ID NO: 20533 - DNA, 21 bp, Homo sapiens
gggcctttaawtcattcccaa

SEQ ID NO: 20534 - DNA, 21 bp, Homo sapiens
ttatgtggttwatttatagtg

SEQ ID NO: 20535 - DNA, 21 bp, Homo sapiens
cgcccaggccrtcaaggactt

SEQ ID NO: 20536 - DNA, 21 bp, Homo sapiens
cccgtcttaayaaaaggccca

SEQ ID NO: 20537 - DNA, 21 bp, Homo sapiens
ttcccagttcytcaagctctc

SEQ ID NO: 20538 - DNA, 21 bp, Homo sapiens
ttgcagactcrcagttatata

SEQ ID NO: 20539 - DNA, 21 bp, Homo sapiens
aggtgagacawcgtaagcaaa

SEQ ID NO: 20540 - DNA, 21 bp, Homo sapiens
tgtactctcaycttttccaga

SEQ ID NO: 20541 - DNA, 21 bp, Homo sapiens
accccggtccygttcgaggat

SEQ ID NO: 20542 - DNA, 21 bp, Homo sapiens
taatatacgtraagtgtctag

SEQ ID NO: 20543 - DNA, 21 bp, Homo sapiens
tatagatagawttgttacaaa

SEQ ID NO: 20544 - DNA, 21 bp, Homo sapiens
gtgaggtcacscaagtttgta

SEQ ID NO: 20545 - DNA, 21 bp, Homo sapiens
aatacattctrcagactaatg

SEQ ID NO: 20546 - DNA, 21 bp, Homo sapiens
gccaaataagragccagtatt

SEQ ID NO: 20547 - DNA, 21 bp, Homo sapiens
cctcggtcaartgcagtcatc

SEQ ID NO: 20548 - DNA, 21 bp, Homo sapiens
ggaatagtccrtagtgcagct

SEQ ID NO: 20549 - DNA, 21 bp, Homo sapiens
tatttgagttycaacatgcta

SEQ ID NO: 20550 - DNA, 21 bp, Homo sapiens
tgttctttaarggtcacaaat

SEQ ID NO: 20551 - DNA, 21 bp, Homo sapiens
acttttcaaayctcatttacc

SEQ ID NO: 20552 - DNA, 21 bp, Homo sapiens
taaagactcaytctcctactt

SEQ ID NO: 20553 - DNA, 21 bp, Homo sapiens
aatcagaatgwgtttacgttg

SEQ ID NO: 20554 - DNA, 21 bp, Homo sapiens
ttctactgtcrgtgcccaatc

SEQ ID NO: 20555 - DNA, 21 bp, Homo sapiens
cagaacttaayagaagccagg

SEQ ID NO: 20556 - DNA, 21 bp, Homo sapiens
taccagaatayaatttcctct

SEQ ID NO: 20557 - DNA, 21 bp, Homo sapiens
cactacagctrcattggtctt

SEQ ID NO: 20558 - DNA, 21 bp, Homo sapiens
cacactagaasaactcaggaa

SEQ ID NO: 20559 - DNA, 21 bp, Homo sapiens
ttacaacccayttgccttgtc

SEQ ID NO: 20560 - DNA, 21 bp, Homo sapiens
tgtgaacagtytacggagatg

SEQ ID NO: 20561 - DNA, 21 bp, Homo sapiens
atgtttgaacwtgaccttctc

SEQ ID NO: 20562 - DNA, 21 bp, Homo sapiens
ttgttctttcyccttgctctg

SEQ ID NO: 20563 - DNA, 21 bp, Homo sapiens
ttgtaagaackttcctggcta

SEQ ID NO: 20564 - DNA, 21 bp, Homo sapiens
caatgccaacmattataatta

SEQ ID NO: 20565 - DNA, 21 bp, Homo sapiens
tcaacacaaasccacttcatc

SEQ ID NO: 20566 - DNA, 21 bp, Homo sapiens
cagaaaacagwtccatttttc

SEQ ID NO: 20567 - DNA, 21 bp, Homo sapiens
gtgggagaaastttctatcaa

SEQ ID NO: 20568 - DNA, 21 bp, Homo sapiens
tcaacagaacsaaatggaaaa

SEQ ID NO: 20569 - DNA, 21 bp, Homo sapiens
ccattcctacyggccctgcgt

SEQ ID NO: 20570 - DNA, 21 bp, Homo sapiens
caaaaatctayaggttgccta

SEQ ID NO: 20571 - DNA, 21 bp, Homo sapiens
agcaaaactcmtgagcaacat

SEQ ID NO: 20572 - DNA, 21 bp, Homo sapiens
agctgttatcrtcagaggcgt

SEQ ID NO: 20573 - DNA, 21 bp, Homo sapiens
tggcatcctaygacgatgata

SEQ ID NO: 20574 - DNA, 21 bp, Homo sapiens
aactgaaaagmcccatcctct

SEQ ID NO: 20575 - DNA, 21 bp, Homo sapiens
tttggcttatktttttgacct

SEQ ID NO: 20576 - DNA, 21 bp, Homo sapiens
atagaaaattstgttgccatt

SEQ ID NO: 20577 - DNA, 21 bp, Homo sapiens
ttagaaaaatratttccaatt

SEQ ID NO: 20578 - DNA, 21 bp, Homo sapiens
ttaaggggacygaatgtattc

SEQ ID NO: 20579 - DNA, 21 bp, Homo sapiens
cagtcctgacrgccaatgaga

SEQ ID NO: 20580 - DNA, 21 bp, Homo sapiens
ttcccatagtycagtgagcag

SEQ ID NO: 20581 - DNA, 21 bp, Homo sapiens
tatagaaaaawaattaacgat

SEQ ID NO: 20582 - DNA, 21 bp, Homo sapiens
taaaaatatargcattctttg

SEQ ID NO: 20583 - DNA, 21 bp, Homo sapiens
ttgctttattyttctctgtct

SEQ ID NO: 20584 - DNA, 21 bp, Homo sapiens
ataaccttaayattttctaat

SEQ ID NO: 20585 - DNA, 21 bp, Homo sapiens
acagtgagaarggcattcatc

SEQ ID NO: 20586 - DNA, 21 bp, Homo sapiens
atttccctcarttttatgttg

SEQ ID NO: 20587 - DNA, 21 bp, Homo sapiens
gctatataatrcataggagta

SEQ ID NO: 20588 - DNA, 21 bp, Homo sapiens
caaatcagtcwttctatatta

SEQ ID NO: 20589 - DNA, 21 bp, Homo sapiens
agagatccaamatgtatcaaa

SEQ ID NO: 20590 - DNA, 21 bp, Homo sapiens
aatttcttggyggaaactact

SEQ ID NO: 20591 - DNA, 21 bp, Homo sapiens
aaaaccccaasccagttacct

SEQ ID NO: 20592 - DNA, 21 bp, Homo sapiens
atatctggctrctagatttca

SEQ ID NO: 20593 - DNA, 21 bp, Homo sapiens
tttatatctayattatcaaga

SEQ ID NO: 20594 - DNA, 21 bp, Homo sapiens
ctatataaatytgaaaacaaa

SEQ ID NO: 20595 - DNA, 21 bp, Homo sapiens
ctcctaccagmccctatatat

SEQ ID NO: 20596 - DNA, 21 bp, Homo sapiens
ttaagagtatygtcatagtcg

SEQ ID NO: 20597 - DNA, 21 bp, Homo sapiens
ttagacaatartaagaatact

SEQ ID NO: 20598 - DNA, 21 bp, Homo sapiens
aatagcacatrtatcattttt

SEQ ID NO: 20599 - DNA, 21 bp, Homo sapiens
aatctgtatakttagattctg

SEQ ID NO: 20600 - DNA, 21 bp, Homo sapiens
ttcaggagctmgaatagaggg

SEQ ID NO: 20601 - DNA, 21 bp, Homo sapiens
agtttatttgygaatgtgtgt

SEQ ID NO: 20602 - DNA, 21 bp, Homo sapiens
gtccaacgtgyttactttgat

SEQ ID NO: 20603 - DNA, 21 bp, Homo sapiens
ctatctgatgrcatacaggat

SEQ ID NO: 20604 - DNA, 21 bp, Homo sapiens
gcattatcagrgaccattagc

SEQ ID NO: 20605 - DNA, 21 bp, Homo sapiens
agcctcacttyagagatgaga

SEQ ID NO: 20606 - DNA, 21 bp, Homo sapiens
tatacttaggycgtgtcttat

SEQ ID NO: 20607 - DNA, 21 bp, Homo sapiens
gaatgactagyatcatatttt

SEQ ID NO: 20608 - DNA, 21 bp, Homo sapiens
tgttgatgctsatgataatat

SEQ ID NO: 20609 - DNA, 21 bp, Homo sapiens
cctgtatataraattttctca

SEQ ID NO: 20610 - DNA, 21 bp, Homo sapiens
gaaaaatgccrctccacccac

SEQ ID NO: 20611 - DNA, 21 bp, Homo sapiens
gcaaattttayttaccacaca

SEQ ID NO: 20612 - DNA, 21 bp, Homo sapiens
ctatcacttgyagcaggaaaa

SEQ ID NO: 20613 - DNA, 21 bp, Homo sapiens
gagaagagcckgcatgcccca

SEQ ID NO: 20614 - DNA, 21 bp, Homo sapiens
agtacactaawccttctgaat

SEQ ID NO: 20615 - DNA, 21 bp, Homo sapiens
tattctagctrtactactaga

SEQ ID NO: 20616 - DNA, 21 bp, Homo sapiens
acaaatcttgrttgaaaaaaa

SEQ ID NO: 20617 - DNA, 21 bp, Homo sapiens
agatctgagtrtcaggcactt

SEQ ID NO: 20618 - DNA, 21 bp, Homo sapiens
gttatactttkggcagtttac

SEQ ID NO: 20619 - DNA, 21 bp, Homo sapiens
atcacaaacaractcattggc

SEQ ID NO: 20620 - DNA, 21 bp, Homo sapiens
ggcagaaaaayagagctatta

SEQ ID NO: 20621 - DNA, 21 bp, Homo sapiens
gaaaaggagaytcagggtacg

SEQ ID NO: 20622 - DNA, 21 bp, Homo sapiens
caagtcagcayattgatcttg

SEQ ID NO: 20623 - DNA, 21 bp, Homo sapiens
cagttaggagkgttaagaaaa

SEQ ID NO: 20624 - DNA, 21 bp, Homo sapiens
tactgaatgtstcagctataa

SEQ ID NO: 20625 - DNA, 21 bp, Homo sapiens
gatagggccamgcccattcag

SEQ ID NO: 20626 - DNA, 21 bp, Homo sapiens
gtatgtgtcasggacaggtga

SEQ ID NO: 20627 - DNA, 21 bp, Homo sapiens
catgttgatartaagataatt

SEQ ID NO: 20628 - DNA, 21 bp, Homo sapiens
aggtcagtttycaaagtcagt

SEQ ID NO: 20629 - DNA, 21 bp, Homo sapiens
aaagcccagarggacctgagc

SEQ ID NO: 20630 - DNA, 21 bp, Homo sapiens
catttttatcwcagataatca

SEQ ID NO: 20631 - DNA, 21 bp, Homo sapiens
gttaaatccamccttaggaga

SEQ ID NO: 20632 - DNA, 21 bp, Homo sapiens
caagagcagaygaaaattatt

SEQ ID NO: 20633 - DNA, 21 bp, Homo sapiens
acagtgaaagsctaaggaaga

SEQ ID NO: 20634 - DNA, 21 bp, Homo sapiens
agttgaatctrtgtttgcaag

SEQ ID NO: 20635 - DNA, 21 bp, Homo sapiens
tgccattgcaycacacagcct

SEQ ID NO: 20636 - DNA, 21 bp, Homo sapiens
tactttcgatrtttatgaaat

SEQ ID NO: 20637 - DNA, 21 bp, Homo sapiens
tatgcaaaccwtacatagcac

SEQ ID NO: 20638 - DNA, 21 bp, Homo sapiens
gaaaatgttaytgataggcaa

SEQ ID NO: 20639 - DNA, 21 bp, Homo sapiens
aatagataacrtatctattct

SEQ ID NO: 20640 - DNA, 21 bp, Homo sapiens
atgctatctayatgctaaaat

SEQ ID NO: 20641 - DNA, 21 bp, Homo sapiens
tgtccagtcaraatggtcagc

SEQ ID NO: 20642 - DNA, 21 bp, Homo sapiens
gttcaacatartcgaaagtat

SEQ ID NO: 20643 - DNA, 21 bp, Homo sapiens
attaggaactrtaactctatc

SEQ ID NO: 20644 - DNA, 21 bp, Homo sapiens
gtaactgtttrttcaaagcta

SEQ ID NO: 20645 - DNA, 21 bp, Homo sapiens
aactgtacaaraagtgtcagc

SEQ ID NO: 20646 - DNA, 21 bp, Homo sapiens
attggcatctrtcaaactcct

SEQ ID NO: 20647 - DNA, 21 bp, Homo sapiens
tacatctatcyattgatctat

SEQ ID NO: 20648 - DNA, 21 bp, Homo sapiens
tattacccacsaaaaagtatt

SEQ ID NO: 20649 - DNA, 21 bp, Homo sapiens
gaaatacaatrgtgagtctga

SEQ ID NO: 20650 - DNA, 21 bp, Homo sapiens
ttactcaaackgtgatttcaa

SEQ ID NO: 20651 - DNA, 21 bp, Homo sapiens
cataaatggckacagaagatg

SEQ ID NO: 20652 - DNA, 21 bp, Homo sapiens
ttccatatccrtagtgcatga

SEQ ID NO: 20653 - DNA, 21 bp, Homo sapiens
cagtggttccscaaatcatga

SEQ ID NO: 20654 - DNA, 21 bp, Homo sapiens
gtagtggtgaraggaccaaag

SEQ ID NO: 20655 - DNA, 21 bp, Homo sapiens
cctctcattckcattctttag

SEQ ID NO: 20656 - DNA, 21 bp, Homo sapiens
tgctaaagggrccaaataatg

SEQ ID NO: 20657 - DNA, 21 bp, Homo sapiens
cattccatgcrtttaagaaga

SEQ ID NO: 20658 - DNA, 21 bp, Homo sapiens
tccttttgtgytgagatggtt

SEQ ID NO: 20659 - DNA, 21 bp, Homo sapiens
caggaagtcasgttgcaatta

SEQ ID NO: 20660 - DNA, 21 bp, Homo sapiens
tctgaaggagycaaaaaagct

SEQ ID NO: 20661 - DNA, 21 bp, Homo sapiens
ttaatgcactkgcctgtattg

SEQ ID NO: 20662 - DNA, 21 bp, Homo sapiens
aagaaaaaaakattttatgaa

SEQ ID NO: 20663 - DNA, 21 bp, Homo sapiens
caagattgttyctaggcatag

SEQ ID NO: 20664 - DNA, 21 bp, Homo sapiens
ttgcttcggtrttctttagag

SEQ ID NO: 20665 - DNA, 21 bp, Homo sapiens
cttttgagacratggcatact

SEQ ID NO: 20666 - DNA, 21 bp, Homo sapiens
cacgatgcatrgtttagggcc

SEQ ID NO: 20667 - DNA, 21 bp, Homo sapiens
atcacttcaawttccaaagac

SEQ ID NO: 20668 - DNA, 21 bp, Homo sapiens
agtagttaccrttgtctatca

SEQ ID NO: 20669 - DNA, 21 bp, Homo sapiens
tctcagtatgytgattttttt

SEQ ID NO: 20670 - DNA, 21 bp, Homo sapiens
acctcatggarccctaccgta

SEQ ID NO: 20671 - DNA, 21 bp, Homo sapiens
atattgaagcwttatgtagtc

SEQ ID NO: 20672 - DNA, 21 bp, Homo sapiens
aactacagcayataccaatta

SEQ ID NO: 20673 - DNA, 21 bp, Homo sapiens
acaaatggtarctatcaaaaa

SEQ ID NO: 20674 - DNA, 21 bp, Homo sapiens
ctgcaatgagsatttctttgt

SEQ ID NO: 20675 - DNA, 21 bp, Homo sapiens
aatactctcckaaggggtaga

SEQ ID NO: 20676 - DNA, 21 bp, Homo sapiens
ttaccaaaaamaccactctag

SEQ ID NO: 20677 - DNA, 21 bp, Homo sapiens
tagacataatraatcacatct

SEQ ID NO: 20678 - DNA, 21 bp, Homo sapiens
cactctccctrgctcaaattt

SEQ ID NO: 20679 - DNA, 21 bp, Homo sapiens
tggaaactgayccttcttaga

SEQ ID NO: 20680 - DNA, 21 bp, Homo sapiens
ttgcatgtaargatctgtgtc

SEQ ID NO: 20681 - DNA, 21 bp, Homo sapiens
taataatcatsaacctgtctg

SEQ ID NO: 20682 - DNA, 21 bp, Homo sapiens
tgcatccctarcattatttat

SEQ ID NO: 20683 - DNA, 21 bp, Homo sapiens
tgtttgtatgyctcacgtacc

SEQ ID NO: 20684 - DNA, 21 bp, Homo sapiens
attccaggtgyggttccccct

SEQ ID NO: 20685 - DNA, 21 bp, Homo sapiens
taaaaaagaakatgcttcgta

SEQ ID NO: 20686 - DNA, 21 bp, Homo sapiens
tggagagctamgagcttggag

SEQ ID NO: 20687 - DNA, 21 bp, Homo sapiens
taatttagaargccattgtga

SEQ ID NO: 20688 - DNA, 21 bp, Homo sapiens
taagtgtaagrtactgatgaa

SEQ ID NO: 20689 - DNA, 21 bp, Homo sapiens
gcagattgtawgaccatccga

SEQ ID NO: 20690 - DNA, 21 bp, Homo sapiens
tcttctgaagmccagctttat

SEQ ID NO: 20691 - DNA, 21 bp, Homo sapiens
tgctgcacagygggcagtgtc

SEQ ID NO: 20692 - DNA, 21 bp, Homo sapiens
aggatgccagkagggttaagc

SEQ ID NO: 20693 - DNA, 21 bp, Homo sapiens
agtaggtaacyggcttttctg

SEQ ID NO: 20694 - DNA, 21 bp, Homo sapiens
ttggaagctastaaccttcga

SEQ ID NO: 20695 - DNA, 21 bp, Homo sapiens
tggagacggamatcagtcacc

SEQ ID NO: 20696 - DNA, 21 bp, Homo sapiens
ttaattgcagyaagggataag

SEQ ID NO: 20697 - DNA, 21 bp, Homo sapiens
tggtgtgagtmactcgcatga

SEQ ID NO: 20698 - DNA, 21 bp, Homo sapiens
ttggtgaaatkagggtcatct

SEQ ID NO: 20699 - DNA, 21 bp, Homo sapiens
ctcctggcacrgggctaagct

SEQ ID NO: 20700 - DNA, 21 bp, Homo sapiens
agtgtgggccrcctggactcg

SEQ ID NO: 20701 - DNA, 21 bp, Homo sapiens
aggcacccagraggaaggata

SEQ ID NO: 20702 - DNA, 21 bp, Homo sapiens
gcataggcaasgcagctctat

SEQ ID NO: 20703 - DNA, 21 bp, Homo sapiens
atttgccgatwatctcgtggt

SEQ ID NO: 20704 - DNA, 21 bp, Homo sapiens
ggctacctgartactcgcggt

SEQ ID NO: 20705 - DNA, 21 bp, Homo sapiens
tttgcaattgrgtctgtggac

SEQ ID NO: 20706 - DNA, 21 bp, Homo sapiens
agactttgagrcctcctcacc

SEQ ID NO: 20707 - DNA, 21 bp, Homo sapiens
tccagaacatwtgttatttaa

SEQ ID NO: 20708 - DNA, 21 bp, Homo sapiens
gagttcagtgytttttagaaa

SEQ ID NO: 20709 - DNA, 21 bp, Homo sapiens
cttgagaattrtttggtactc

SEQ ID NO: 20710 - DNA, 21 bp, Homo sapiens
aagctaaatcsaaagataaac

SEQ ID NO: 20711 - DNA, 21 bp, Homo sapiens
atataacaaastgttttaaga

SEQ ID NO: 20712 - DNA, 21 bp, Homo sapiens
ggacagcccawtagagtataa

SEQ ID NO: 20713 - DNA, 21 bp, Homo sapiens
agaagaagagwtctcactaag

SEQ ID NO: 20714 - DNA, 21 bp, Homo sapiens
acacttggctstcttttactc

SEQ ID NO: 20715 - DNA, 21 bp, Homo sapiens
tgaaggcataytataaattac

SEQ ID NO: 20716 - DNA, 21 bp, Homo sapiens
aataacctatrtgcttgatgt

SEQ ID NO: 20717 - DNA, 21 bp, Homo sapiens
tttttggaaayttagacctcc

SEQ ID NO: 20718 - DNA, 21 bp, Homo sapiens
ttttagtacaytccttttcaa

SEQ ID NO: 20719 - DNA, 21 bp, Homo sapiens
tgccaggaacygtatcaaata

SEQ ID NO: 20720 - DNA, 21 bp, Homo sapiens
attcacttackattttcatta

SEQ ID NO: 20721 - DNA, 21 bp, Homo sapiens
tataatattcmcaccacatgc

SEQ ID NO: 20722 - DNA, 21 bp, Homo sapiens
taaaaattcarcgagaataac

SEQ ID NO: 20723 - DNA, 21 bp, Homo sapiens
ggcaaacccaygtttcagtct

SEQ ID NO: 20724 - DNA, 21 bp, Homo sapiens
aaatgaaggaraatagttcag

SEQ ID NO: 20725 - DNA, 21 bp, Homo sapiens
ctgccaataayagcctatgct

SEQ ID NO: 20726 - DNA, 21 bp, Homo sapiens
cattggttctyaaatgagtct

SEQ ID NO: 20727 - DNA, 21 bp, Homo sapiens
acagcttttcrgaaggaactc

SEQ ID NO: 20728 - DNA, 21 bp, Homo sapiens
cattcctgacwgctttttgct

SEQ ID NO: 20729 - DNA, 21 bp, Homo sapiens
gcggccaatcwgcacagcaca

SEQ ID NO: 20730 - DNA, 21 bp, Homo sapiens
cattaattgtktagatgtaat

SEQ ID NO: 20731 - DNA, 21 bp, Homo sapiens
gcctggccaaytggtaaatcc

SEQ ID NO: 20732 - DNA, 21 bp, Homo sapiens
actcctagccrgatgcagatg

SEQ ID NO: 20733 - DNA, 21 bp, Homo sapiens
agatgtcatarcatggtatca

SEQ ID NO: 20734 - DNA, 21 bp, Homo sapiens
gtgcaggaacyaaaattcaat

SEQ ID NO: 20735 - DNA, 21 bp, Homo sapiens
cttctatagcrctaagggtgt

SEQ ID NO: 20736 - DNA, 21 bp, Homo sapiens
acccttttacsttatatatac

SEQ ID NO: 20737 - DNA, 21 bp, Homo sapiens
ttattgcagcmaccactttga

SEQ ID NO: 20738 - DNA, 21 bp, Homo sapiens
ctagtggcttragggcctggc

SEQ ID NO: 20739 - DNA, 21 bp, Homo sapiens
ctgtcaatgtsagtcataaac

SEQ ID NO: 20740 - DNA, 21 bp, Homo sapiens
cctctataaayatgtcgaata

SEQ ID NO: 20741 - DNA, 21 bp, Homo sapiens
aacgatgttamagttggaggc

SEQ ID NO: 20742 - DNA, 21 bp, Homo sapiens
cagtgacctcmgtgcggatcc

SEQ ID NO: 20743 - DNA, 21 bp, Homo sapiens
tggtctttaaygctacgcaac

SEQ ID NO: 20744 - DNA, 21 bp, Homo sapiens
tttcttacacraagatggtga

SEQ ID NO: 20745 - DNA, 21 bp, Homo sapiens
agcctaagtaytggttttcct

SEQ ID NO: 20746 - DNA, 21 bp, Homo sapiens
ggtattcgggkgtatgtccaa

SEQ ID NO: 20747 - DNA, 21 bp, Homo sapiens
atcaggaaggsaccgaaaatt

SEQ ID NO: 20748 - DNA, 21 bp, Homo sapiens
actggtacttracaggattgt

SEQ ID NO: 20749 - DNA, 21 bp, Homo sapiens
acatcttgctraaacagtctg

SEQ ID NO: 20750 - DNA, 21 bp, Homo sapiens
tgctatgttaytactgctaat

SEQ ID NO: 20751 - DNA, 21 bp, Homo sapiens
tttgttaatasacgcttatct

SEQ ID NO: 20752 - DNA, 21 bp, Homo sapiens
acgtgttttakatgcatgcat

SEQ ID NO: 20753 - DNA, 21 bp, Homo sapiens
agtcatctcaytgttgaataa

SEQ ID NO: 20754 - DNA, 21 bp, Homo sapiens
acaggtactgyaaccttgatg

SEQ ID NO: 20755 - DNA, 21 bp, Homo sapiens
tattaatctgscatgaatact

SEQ ID NO: 20756 - DNA, 21 bp, Homo sapiens
gaataatcatrtctcccttat

SEQ ID NO: 20757 - DNA, 21 bp, Homo sapiens
atactgtgacragctgctata

SEQ ID NO: 20758 - DNA, 21 bp, Homo sapiens
tctaagaatartcaagtgaca

SEQ ID NO: 20759 - DNA, 21 bp, Homo sapiens
agtccttcttsgtatcttttc

SEQ ID NO: 20760 - DNA, 21 bp, Homo sapiens
ctgcgtatcaygtggttacca

SEQ ID NO: 20761 - DNA, 21 bp, Homo sapiens
attcttctccygctttgaagg

SEQ ID NO: 20762 - DNA, 21 bp, Homo sapiens
atcaatagttstagcaactga

SEQ ID NO: 20763 - DNA, 21 bp, Homo sapiens
ctgccatcaaraccactagta

SEQ ID NO: 20764 - DNA, 21 bp, Homo sapiens
cagaattcttktaaggatttc

SEQ ID NO: 20765 - DNA, 21 bp, Homo sapiens
tccttgtgatyttctcacctc

SEQ ID NO: 20766 - DNA, 21 bp, Homo sapiens
ggcctcagctyccaactctgg

SEQ ID NO: 20767 - DNA, 21 bp, Homo sapiens
gggctgactasgggtttgaga

SEQ ID NO: 20768 - DNA, 21 bp, Homo sapiens
actcagagcarctttcactat

SEQ ID NO: 20769 - DNA, 21 bp, Homo sapiens
gaacacactgmttagggtggt

SEQ ID NO: 20770 - DNA, 21 bp, Homo sapiens
gtggctgacartgacttgtcc

SEQ ID NO: 20771 - DNA, 21 bp, Homo sapiens
ttgtctgtgtkggttactaat

SEQ ID NO: 20772 - DNA, 21 bp, Homo sapiens
agcccctggayttggtatcag

SEQ ID NO: 20773 - DNA, 21 bp, Homo sapiens
tggtggctacracctccaggg

SEQ ID NO: 20774 - DNA, 21 bp, Homo sapiens
aaggatatttrcaataaacat

SEQ ID NO: 20775 - DNA, 21 bp, Homo sapiens
gcctggtgagygatcctggaa

SEQ ID NO: 20776 - DNA, 21 bp, Homo sapiens
gaaatgactayctcaagctgt

SEQ ID NO: 20777 - DNA, 21 bp, Homo sapiens
acatgtttatyactctcactt

SEQ ID NO: 20778 - DNA, 21 bp, Homo sapiens
accctgtcatmtgcacccttc

SEQ ID NO: 20779 - DNA, 21 bp, Homo sapiens
ccccacaggaratttgaggtt

SEQ ID NO: 20780 - DNA, 21 bp, Homo sapiens
aatgtggttaraatttttaga

SEQ ID NO: 20781 - DNA, 21 bp, Homo sapiens
gtcgtgaagascagaagtact

SEQ ID NO: 20782 - DNA, 21 bp, Homo sapiens
attgggtgttktaatatctag

SEQ ID NO: 20783 - DNA, 21 bp, Homo sapiens
tctggtcattycataataaaa

SEQ ID NO: 20784 - DNA, 21 bp, Homo sapiens
acttacaaatmacttcctttc

SEQ ID NO: 20785 - DNA, 21 bp, Homo sapiens
gttttagtttrtaaagtagat

SEQ ID NO: 20786 - DNA, 21 bp, Homo sapiens
tgcttgctatracaaaatcga

SEQ ID NO: 20787 - DNA, 21 bp, Homo sapiens
aatacattgarcaccctcttg

SEQ ID NO: 20788 - DNA, 21 bp, Homo sapiens
aacagacttayatagacattg

SEQ ID NO: 20789 - DNA, 21 bp, Homo sapiens
ctgaatattgyctgggcctaa

SEQ ID NO: 20790 - DNA, 21 bp, Homo sapiens
tcctttggaaygaacgaaaat

SEQ ID NO: 20791 - DNA, 21 bp, Homo sapiens
caatcactttrtaaaaaaatt

SEQ ID NO: 20792 - DNA, 21 bp, Homo sapiens
aagaagttgcratgtacagca

SEQ ID NO: 20793 - DNA, 21 bp, Homo sapiens
tttttaaaagmagatttttag

SEQ ID NO: 20794 - DNA, 21 bp, Homo sapiens
atcccattaartaaatatttc

SEQ ID NO: 20795 - DNA, 21 bp, Homo sapiens
aaacttttgtstcttctctta

SEQ ID NO: 20796 - DNA, 21 bp, Homo sapiens
tatcttcttawacccaccaac

SEQ ID NO: 20797 - DNA, 21 bp, Homo sapiens
ttacttaaagsagccaaaatc

SEQ ID NO: 20798 - DNA, 21 bp, Homo sapiens
cgaaactttgmagtggagcaa

SEQ ID NO: 20799 - DNA, 21 bp, Homo sapiens
tgaggtctgaygtatgtgaaa

SEQ ID NO: 20800 - DNA, 21 bp, Homo sapiens
attattttggycttgctaggc

SEQ ID NO: 20801 - DNA, 21 bp, Homo sapiens
agaatgaatcrgttcctttac

SEQ ID NO: 20802 - DNA, 21 bp, Homo sapiens
atttatttgargtttttgttc

SEQ ID NO: 20803 - DNA, 21 bp, Homo sapiens
gaacattccartggatcagca

SEQ ID NO: 20804 - DNA, 21 bp, Homo sapiens
atgggacctasagttaaattc

SEQ ID NO: 20805 - DNA, 21 bp, Homo sapiens
taataatatartccttttctt

SEQ ID NO: 20806 - DNA, 21 bp, Homo sapiens
aagagttttgrttggacacag

SEQ ID NO: 20807 - DNA, 21 bp, Homo sapiens
aatgtattaarccaatatgga

SEQ ID NO: 20808 - DNA, 21 bp, Homo sapiens
gaagacaacartggaaagcta

SEQ ID NO: 20809 - DNA, 21 bp, Homo sapiens
aaagcaagcargttgcaagtg

SEQ ID NO: 20810 - DNA, 21 bp, Homo sapiens
taaagtcatcmaattaaaaga

SEQ ID NO: 20811 - DNA, 21 bp, Homo sapiens
gttgaaggctrtggaagaaag

SEQ ID NO: 20812 - DNA, 21 bp, Homo sapiens
aaaaagtgtcrtagcctatat

SEQ ID NO: 20813 - DNA, 21 bp, Homo sapiens
taacacctccraagattctag

SEQ ID NO: 20814 - DNA, 21 bp, Homo sapiens
ttcttacagaytgaacatgta

SEQ ID NO: 20815 - DNA, 21 bp, Homo sapiens
tacacttactrtatatcttgc

SEQ ID NO: 20816 - DNA, 21 bp, Homo sapiens
gatcaaggcarcttgacttct

SEQ ID NO: 20817 - DNA, 21 bp, Homo sapiens
taatgcaatayagaatcaaag

SEQ ID NO: 20818 - DNA, 21 bp, Homo sapiens
cacattttctstttgctgtcc

SEQ ID NO: 20819 - DNA, 21 bp, Homo sapiens
tggtttgctcygatttgtgat

SEQ ID NO: 20820 - DNA, 21 bp, Homo sapiens
gaagagaataygctgtaaact

SEQ ID NO: 20821 - DNA, 21 bp, Homo sapiens
taaggtaaagmagctaaacat

SEQ ID NO: 20822 - DNA, 21 bp, Homo sapiens
ccgaagtggcytgaggaacac

SEQ ID NO: 20823 - DNA, 21 bp, Homo sapiens
ttcaggtgccyagtgctgcct

SEQ ID NO: 20824 - DNA, 21 bp, Homo sapiens
attgtccataygtaagccctt

SEQ ID NO: 20825 - DNA, 21 bp, Homo sapiens
cttataattakaaagtgcaga

SEQ ID NO: 20826 - DNA, 21 bp, Homo sapiens
tacactcaaaytgagaccctt

SEQ ID NO: 20827 - DNA, 21 bp, Homo sapiens
ttggccatccyttatcaatat

SEQ ID NO: 20828 - DNA, 21 bp, Homo sapiens
caagaaagaawgttgtgggat

SEQ ID NO: 20829 - DNA, 21 bp, Homo sapiens
tctgagggacmagcacagtca

SEQ ID NO: 20830 - DNA, 21 bp, Homo sapiens
ggatggatgckgtcagctctt

SEQ ID NO: 20831 - DNA, 21 bp, Homo sapiens
ccttaaccacytgaagaattt

SEQ ID NO: 20832 - DNA, 21 bp, Homo sapiens
atctcactccytttggctctg

SEQ ID NO: 20833 - DNA, 21 bp, Homo sapiens
tttacattttsgttctgagga

SEQ ID NO: 20834 - DNA, 21 bp, Homo sapiens
cataatgtccmgtcccactct

SEQ ID NO: 20835 - DNA, 21 bp, Homo sapiens
gagttttcacrgatgctaacg

SEQ ID NO: 20836 - DNA, 21 bp, Homo sapiens
tttcgacataytctggattcc

SEQ ID NO: 20837 - DNA, 21 bp, Homo sapiens
tgggaagggaragccaccctt

SEQ ID NO: 20838 - DNA, 21 bp, Homo sapiens
gccaaaaagtrgattatccca

SEQ ID NO: 20839 - DNA, 21 bp, Homo sapiens
tataaattcaraggtcctccc

SEQ ID NO: 20840 - DNA, 21 bp, Homo sapiens
gtatgtatgayacagctgcag

SEQ ID NO: 20841 - DNA, 21 bp, Homo sapiens
ggcacaaacayccagatattt

SEQ ID NO: 20842 - DNA, 21 bp, Homo sapiens
tgaccttgaargggcacagtt

SEQ ID NO: 20843 - DNA, 21 bp, Homo sapiens
ccaggaggtgytatgttgttt

SEQ ID NO: 20844 - DNA, 21 bp, Homo sapiens
atcctgtaccrtgatactgta

SEQ ID NO: 20845 - DNA, 21 bp, Homo sapiens
ctagaaagccytgtttggcat

SEQ ID NO: 20846 - DNA, 21 bp, Homo sapiens
gaagcccttasgggaaacaca

SEQ ID NO: 20847 - DNA, 21 bp, Homo sapiens
ctctggcttgkcccgtcgttg

SEQ ID NO: 20848 - DNA, 21 bp, Homo sapiens
cctgaagtggrccctcaccag

SEQ ID NO: 20849 - DNA, 21 bp, Homo sapiens
atttttaaaaratcgttgcag

SEQ ID NO: 20850 - DNA, 21 bp, Homo sapiens
ctgcgcttccycacccacccc

SEQ ID NO: 20851 - DNA, 21 bp, Homo sapiens
ttgtgcagacragaaaaagtc

SEQ ID NO: 20852 - DNA, 21 bp, Homo sapiens
acccttctccycttcttcagc

SEQ ID NO: 20853 - DNA, 21 bp, Homo sapiens
ttaccttgcaytcattccttc

SEQ ID NO: 20854 - DNA, 21 bp, Homo sapiens
aataagatacrgctactttgg

SEQ ID NO: 20855 - DNA, 21 bp, Homo sapiens
gaatgagttcygaagggcttt

SEQ ID NO: 20856 - DNA, 21 bp, Homo sapiens
tgttttttttwaaaaaaattg

SEQ ID NO: 20857 - DNA, 21 bp, Homo sapiens
gtggtccaatrtgctgcgggc

SEQ ID NO: 20858 - DNA, 21 bp, Homo sapiens
atatttttacrtaagtactcc

SEQ ID NO: 20859 - DNA, 21 bp, Homo sapiens
tactcacatgmtccctctccc

SEQ ID NO: 20860 - DNA, 21 bp, Homo sapiens
aggggaccacrccccagaaga

SEQ ID NO: 20861 - DNA, 21 bp, Homo sapiens
cagctgcctcwctctctctga

SEQ ID NO: 20862 - DNA, 21 bp, Homo sapiens
ttacagcatgyagcatgcatt

SEQ ID NO: 20863 - DNA, 21 bp, Homo sapiens
gcaactacccsacatggtcag

SEQ ID NO: 20864 - DNA, 21 bp, Homo sapiens
gaccacatcamacctcctggc

SEQ ID NO: 20865 - DNA, 21 bp, Homo sapiens
tagattgtgtyctgacatggt

SEQ ID NO: 20866 - DNA, 21 bp, Homo sapiens
atcttacctgyttttctatgt

SEQ ID NO: 20867 - DNA, 21 bp, Homo sapiens
gtttttggtcwctgattcaat

SEQ ID NO: 20868 - DNA, 21 bp, Homo sapiens
ttggacccccwttgcctggca

SEQ ID NO: 20869 - DNA, 21 bp, Homo sapiens
cccaggccacraattacagcc

SEQ ID NO: 20870 - DNA, 21 bp, Homo sapiens
ataataatcaytgtcagacca

SEQ ID NO: 20871 - DNA, 21 bp, Homo sapiens
atgtccattarcgtgttaaag

SEQ ID NO: 20872 - DNA, 21 bp, Homo sapiens
ctgcaatctcyggtttaagaa

SEQ ID NO: 20873 - DNA, 21 bp, Homo sapiens
aattaccataygccccagaaa

SEQ ID NO: 20874 - DNA, 21 bp, Homo sapiens
cagccacaagycccgttcgga

SEQ ID NO: 20875 - DNA, 21 bp, Homo sapiens
tttttacataygagaatttca

SEQ ID NO: 20876 - DNA, 21 bp, Homo sapiens
ccctccccccwttgtctcagg

SEQ ID NO: 20877 - DNA, 21 bp, Homo sapiens
actgtgccatrctaaaccatc

SEQ ID NO: 20878 - DNA, 21 bp, Homo sapiens
tgctgggggtsacaggcagaa

SEQ ID NO: 20879 - DNA, 21 bp, Homo sapiens
tacagtcattkgtcattatct

SEQ ID NO: 20880 - DNA, 21 bp, Homo sapiens
tccaatgaacrcttcacactc

SEQ ID NO: 20881 - DNA, 21 bp, Homo sapiens
cccaaatggcracatcttcat

SEQ ID NO: 20882 - DNA, 21 bp, Homo sapiens
ttgaactcatyggttactacc

SEQ ID NO: 20883 - DNA, 21 bp, Homo sapiens
attactatgtrtgatacatga

SEQ ID NO: 20884 - DNA, 21 bp, Homo sapiens
catgcagtggrtgcacttttt

SEQ ID NO: 20885 - DNA, 21 bp, Homo sapiens
atcaatggtcsaggtaagcag

SEQ ID NO: 20886 - DNA, 21 bp, Homo sapiens
ttattttgatktttttggtag

SEQ ID NO: 20887 - DNA, 21 bp, Homo sapiens
catctgaagaraagtttcccc

SEQ ID NO: 20888 - DNA, 21 bp, Homo sapiens
cattttagccrggatgatcag

SEQ ID NO: 20889 - DNA, 21 bp, Homo sapiens
tggttttccawttcccactgg

SEQ ID NO: 20890 - DNA, 21 bp, Homo sapiens
ataatcaacckgcacatttac

SEQ ID NO: 20891 - DNA, 21 bp, Homo sapiens
atgggttctawctgcagaatt

SEQ ID NO: 20892 - DNA, 21 bp, Homo sapiens
ttagcccagaycctaagtgag

SEQ ID NO: 20893 - DNA, 21 bp, Homo sapiens
gtagcatttcwgggaaaaatg

SEQ ID NO: 20894 - DNA, 21 bp, Homo sapiens
gaaagattccyatgataaagg

SEQ ID NO: 20895 - DNA, 21 bp, Homo sapiens
ctcgttagtcrcatcttcttt

SEQ ID NO: 20896 - DNA, 21 bp, Homo sapiens
ggtgctgcacygtacccatgc

SEQ ID NO: 20897 - DNA, 21 bp, Homo sapiens
gcaagaaagaygcattcccct

SEQ ID NO: 20898 - DNA, 21 bp, Homo sapiens
cattcatcccwtctatatcca

SEQ ID NO: 20899 - DNA, 21 bp, Homo sapiens
ttgtaatgtgwgtatatcaat

SEQ ID NO: 20900 - DNA, 21 bp, Homo sapiens
ttatatcagcwtgaacttgct

SEQ ID NO: 20901 - DNA, 21 bp, Homo sapiens
atcccttttgyatcttcaaag

SEQ ID NO: 20902 - DNA, 21 bp, Homo sapiens
tcatttaatcmgtgctcctat

SEQ ID NO: 20903 - DNA, 21 bp, Homo sapiens
atgaaaatccyttgtgtgttc

SEQ ID NO: 20904 - DNA, 21 bp, Homo sapiens
ctgtctaattwtctgttatct

SEQ ID NO: 20905 - DNA, 21 bp, Homo sapiens
ataactccatygctgatgtta

SEQ ID NO: 20906 - DNA, 21 bp, Homo sapiens
tcaacccagtkaaattatagt

SEQ ID NO: 20907 - DNA, 21 bp, Homo sapiens
cagataaccasgtaatacaaa

SEQ ID NO: 20908 - DNA, 21 bp, Homo sapiens
acacagtcatrgaagtgatag

SEQ ID NO: 20909 - DNA, 21 bp, Homo sapiens
cctttttgctstctcaatttg

SEQ ID NO: 20910 - DNA, 21 bp, Homo sapiens
tataatactgkagagatgata

SEQ ID NO: 20911 - DNA, 21 bp, Homo sapiens
taagaatcctkctgagatgac

SEQ ID NO: 20912 - DNA, 21 bp, Homo sapiens
tcaaaaatctrcttacttaaa

SEQ ID NO: 20913 - DNA, 21 bp, Homo sapiens
tacctcaggayggaaaaagaa

SEQ ID NO: 20914 - DNA, 21 bp, Homo sapiens
aaaaaagatcrtctgtggagc

SEQ ID NO: 20915 - DNA, 21 bp, Homo sapiens
gtcatataaakttcctatagc

SEQ ID NO: 20916 - DNA, 21 bp, Homo sapiens
gttcaatgccygcactcacca

SEQ ID NO: 20917 - DNA, 21 bp, Homo sapiens
gaacatattcrtgtgcgtgta

SEQ ID NO: 20918 - DNA, 21 bp, Homo sapiens
agcaatctatrttgatggaaa

SEQ ID NO: 20919 - DNA, 21 bp, Homo sapiens
gggctaagaaratatttgaat

SEQ ID NO: 20920 - DNA, 21 bp, Homo sapiens
acaaacagcarttcctccgtg

SEQ ID NO: 20921 - DNA, 21 bp, Homo sapiens
cctgtggtgtygagtgtgttg

SEQ ID NO: 20922 - DNA, 21 bp, Homo sapiens
cctaggaagcmttctaatctt

SEQ ID NO: 20923 - DNA, 21 bp, Homo sapiens
gtgagttactyatccccattt

SEQ ID NO: 20924 - DNA, 21 bp, Homo sapiens
ctggtcaattratttgcatgg

SEQ ID NO: 20925 - DNA, 21 bp, Homo sapiens
gcttttccaaraatttgattt

SEQ ID NO: 20926 - DNA, 21 bp, Homo sapiens
ttttaaatgtytttccctaga

SEQ ID NO: 20927 - DNA, 21 bp, Homo sapiens
cgctgaaaaaygagagccaga

SEQ ID NO: 20928 - DNA, 21 bp, Homo sapiens
gactttttttyttaaccactt

SEQ ID NO: 20929 - DNA, 21 bp, Homo sapiens
actaaacaggrttctaggcca

SEQ ID NO: 20930 - DNA, 21 bp, Homo sapiens
gttgtagtaamcgtgaacaaa

SEQ ID NO: 20931 - DNA, 21 bp, Homo sapiens
atagaatgccrtcagccaatg

SEQ ID NO: 20932 - DNA, 21 bp, Homo sapiens
accaataatgkttaggaattt

SEQ ID NO: 20933 - DNA, 21 bp, Homo sapiens
gtggccacttkctaattatat

SEQ ID NO: 20934 - DNA, 21 bp, Homo sapiens
aatacaagacrtaatattgac

SEQ ID NO: 20935 - DNA, 21 bp, Homo sapiens
caattgttctrtggggtatgg

SEQ ID NO: 20936 - DNA, 21 bp, Homo sapiens
cagcggtcgtyggccagtgtg

SEQ ID NO: 20937 - DNA, 21 bp, Homo sapiens
caggaaatatyctcttttagg

SEQ ID NO: 20938 - DNA, 21 bp, Homo sapiens
atgagcataaratctaaatag

SEQ ID NO: 20939 - DNA, 21 bp, Homo sapiens
tctcagtaatmacattgtcca

SEQ ID NO: 20940 - DNA, 21 bp, Homo sapiens
ctagaatactsctcctccact

SEQ ID NO: 20941 - DNA, 21 bp, Homo sapiens
catgcggtatstgccattttg

SEQ ID NO: 20942 - DNA, 21 bp, Homo sapiens
tttcattagtractcacatgg

SEQ ID NO: 20943 - DNA, 21 bp, Homo sapiens
ttctcttgctkttctctaaag

SEQ ID NO: 20944 - DNA, 21 bp, Homo sapiens
cgttgagttastggttcactg

SEQ ID NO: 20945 - DNA, 21 bp, Homo sapiens
ttatagatgargttcccttag

SEQ ID NO: 20946 - DNA, 21 bp, Homo sapiens
ccctctcagtyagctgctaca

SEQ ID NO: 20947 - DNA, 21 bp, Homo sapiens
ttaggtgtatstctgctcatg

SEQ ID NO: 20948 - DNA, 21 bp, Homo sapiens
taataaataastgaaatacca

SEQ ID NO: 20949 - DNA, 21 bp, Homo sapiens
cgttgcaggcrcgttgaatgt

SEQ ID NO: 20950 - DNA, 21 bp, Homo sapiens
tatgtctttgrgcttggtaat

SEQ ID NO: 20951 - DNA, 21 bp, Homo sapiens
ggtgattccartgtgagtggt

SEQ ID NO: 20952 - DNA, 21 bp, Homo sapiens
tgttggtttcygtgttgatga

SEQ ID NO: 20953 - DNA, 21 bp, Homo sapiens
aagggtgtgaycagttccatg

SEQ ID NO: 20954 - DNA, 21 bp, Homo sapiens
gtaaaacagtrgatgtctttc

SEQ ID NO: 20955 - DNA, 21 bp, Homo sapiens
tgatagagaasctttccctag

SEQ ID NO: 20956 - DNA, 21 bp, Homo sapiens
acaatctgatygctcccctga

SEQ ID NO: 20957 - DNA, 21 bp, Homo sapiens
gaaaatatgtyctgtgcaaac

SEQ ID NO: 20958 - DNA, 21 bp, Homo sapiens
cttggcgagtytgttcatacc

SEQ ID NO: 20959 - DNA, 21 bp, Homo sapiens
gcgcccggccygtttcttttg

SEQ ID NO: 20960 - DNA, 21 bp, Homo sapiens
agttcctcaaktaacgagttt

SEQ ID NO: 20961 - DNA, 21 bp, Homo sapiens
gccggtatctrcactgcagga

SEQ ID NO: 20962 - DNA, 21 bp, Homo sapiens
atttcagatgkttttaatcct

SEQ ID NO: 20963 - DNA, 21 bp, Homo sapiens
agtcattgtcrttagaaatgt

SEQ ID NO: 20964 - DNA, 21 bp, Homo sapiens
tccagagaacrtctgacttgc

SEQ ID NO: 20965 - DNA, 21 bp, Homo sapiens
ggactccacgsgccaagttaa

SEQ ID NO: 20966 - DNA, 21 bp, Homo sapiens
aggctggggtsctttgttatg

SEQ ID NO: 20967 - DNA, 21 bp, Homo sapiens
aaaacggttasagttccattt

SEQ ID NO: 20968 - DNA, 21 bp, Homo sapiens
tcggtgtgacycaagttctcc

SEQ ID NO: 20969 - DNA, 21 bp, Homo sapiens
tcctgcggtgraagtcaatgc

SEQ ID NO: 20970 - DNA, 21 bp, Homo sapiens
ttccatataasccattctcca

SEQ ID NO: 20971 - DNA, 21 bp, Homo sapiens
ttctgtgcccrgcgataaggt

SEQ ID NO: 20972 - DNA, 21 bp, Homo sapiens
ttttgttgaaytgaaaagggg

SEQ ID NO: 20973 - DNA, 21 bp, Homo sapiens
gggtgttattwtgtcctctgc

SEQ ID NO: 20974 - DNA, 21 bp, Homo sapiens
gaggggctgakgctctgactc

SEQ ID NO: 20975 - DNA, 21 bp, Homo sapiens
ctgaatgaagrgctctctggt

SEQ ID NO: 20976 - DNA, 21 bp, Homo sapiens
tgtaagggagmgatttatgtg

SEQ ID NO: 20977 - DNA, 21 bp, Homo sapiens
gtggagaagtygtcagcaatg

SEQ ID NO: 20978 - DNA, 21 bp, Homo sapiens
ttctggtaaaygaagctacca

SEQ ID NO: 20979 - DNA, 21 bp, Homo sapiens
atacatacatrcaattctgga

SEQ ID NO: 20980 - DNA, 21 bp, Homo sapiens
ccgccggcatyacttatcagg

SEQ ID NO: 20981 - DNA, 21 bp, Homo sapiens
ctccgtccccsatcctggatg

SEQ ID NO: 20982 - DNA, 21 bp, Homo sapiens
aattaagactyagccttggtt

SEQ ID NO: 20983 - DNA, 21 bp, Homo sapiens
ctagctcaaartaaaggagca

SEQ ID NO: 20984 - DNA, 21 bp, Homo sapiens
ttctgtctcakgaacacaata

SEQ ID NO: 20985 - DNA, 21 bp, Homo sapiens
tgcgtggcaaygttcctctgg

SEQ ID NO: 20986 - DNA, 21 bp, Homo sapiens
ctatcagtacrtgggttcaca

SEQ ID NO: 20987 - DNA, 21 bp, Homo sapiens
ttggtccttgsgggcagcctc

SEQ ID NO: 20988 - DNA, 21 bp, Homo sapiens
gtagaaatatyaaggtgtcaa

SEQ ID NO: 20989 - DNA, 21 bp, Homo sapiens
gcatttttgaycttggatgca

SEQ ID NO: 20990 - DNA, 21 bp, Homo sapiens
aataatgaacrtgccaactaa

SEQ ID NO: 20991 - DNA, 21 bp, Homo sapiens
aataatgaacrtgccaactaa

SEQ ID NO: 20992 - DNA, 21 bp, Homo sapiens
aatgcctgaawttccaactcc

SEQ ID NO: 20993 - DNA, 21 bp, Homo sapiens
aatgcctgaawttccaactcc

SEQ ID NO: 20994 - DNA, 21 bp, Homo sapiens
tgtgagatgcyatgatcaagc

SEQ ID NO: 20995 - DNA, 21 bp, Homo sapiens
aattgtgctaytttaaaagaa

SEQ ID NO: 20996 - DNA, 21 bp, Homo sapiens
ggattccgatygtaaaggaac

SEQ ID NO: 20997 - DNA, 21 bp, Homo sapiens
tccaatggctmttgcccgctt

SEQ ID NO: 20998 - DNA, 21 bp, Homo sapiens
cctaagctggsacatcactgg

SEQ ID NO: 20999 - DNA, 21 bp, Homo sapiens
gaagggttagraccaaacaca

SEQ ID NO: 21000 - DNA, 21 bp, Homo sapiens
caccatctcaygaatggcaag

SEQ ID NO: 21001 - DNA, 21 bp, Homo sapiens
ggggaatgagygctgttcggc

SEQ ID NO: 21002 - DNA, 21 bp, Homo sapiens
tgacagtccayttagctggtg

SEQ ID NO: 21003 - DNA, 21 bp, Homo sapiens
tgacagtccayttagctggtg

SEQ ID NO: 21004 - DNA, 21 bp, Homo sapiens
acaaaaatacrtcaatccact

SEQ ID NO: 21005 - DNA, 21 bp, Homo sapiens
acaaaaatacrtcaatccact

SEQ ID NO: 21006 - DNA, 21 bp, Homo sapiens
ctttctttcayacaacattca

SEQ ID NO: 21007 - DNA, 21 bp, Homo sapiens
cttatgtcccygggaattgag

SEQ ID NO: 21008 - DNA, 21 bp, Homo sapiens
cttatgtcccygggaattgag

SEQ ID NO: 21009 - DNA, 21 bp, Homo sapiens
gggatgctgcrcttggaacac

SEQ ID NO: 21010 - DNA, 21 bp, Homo sapiens
tgacacaggcktaaactctga

SEQ ID NO: 21011 - DNA, 21 bp, Homo sapiens
tatgcagggtrttaataaagt

SEQ ID NO: 21012 - DNA, 21 bp, Homo sapiens
tgctcttcctsccagcaaaaa

SEQ ID NO: 21013 - DNA, 21 bp, Homo sapiens
ttagcagcttyattgtggaat

SEQ ID NO: 21014 - DNA, 21 bp, Homo sapiens
cctgtttttcmaagtatctgc

SEQ ID NO: 21015 - DNA, 21 bp, Homo sapiens
aaatatggagrtgaatttgtt

SEQ ID NO: 21016 - DNA, 21 bp, Homo sapiens
attgatttgargattaaggtc

SEQ ID NO: 21017 - DNA, 21 bp, Homo sapiens
cctgatatggkatattaatgc

SEQ ID NO: 21018 - DNA, 21 bp, Homo sapiens
agagatgcctyactgataccg

SEQ ID NO: 21019 - DNA, 21 bp, Homo sapiens
cttgcaccccrgtgaccctga

SEQ ID NO: 21020 - DNA, 21 bp, Homo sapiens
atgcacatttyagaaagataa

SEQ ID NO: 21021 - DNA, 21 bp, Homo sapiens
cggattgacayagtttataat

SEQ ID NO: 21022 - DNA, 21 bp, Homo sapiens
aagcagactcrgtcacaggag

SEQ ID NO: 21023 - DNA, 21 bp, Homo sapiens
cattttggatscaggcaactg

SEQ ID NO: 21024 - DNA, 21 bp, Homo sapiens
gtgactggtcscaagtgccat

SEQ ID NO: 21025 - DNA, 21 bp, Homo sapiens
ttactcttacrtgagagctca

SEQ ID NO: 21026 - DNA, 21 bp, Homo sapiens
gagcttggacmcagttttctt

SEQ ID NO: 21027 - DNA, 21 bp, Homo sapiens
caggattaggkcaacgcattc

SEQ ID NO: 21028 - DNA, 21 bp, Homo sapiens
ggcctcagggwttttaggaaa

SEQ ID NO: 21029 - DNA, 21 bp, Homo sapiens
ccggaacaccrcctgggtaaa

SEQ ID NO: 21030 - DNA, 21 bp, Homo sapiens
ggttttattgycatgctttga

SEQ ID NO: 21031 - DNA, 21 bp, Homo sapiens
cttagtgtttmgaaaagaaaa

SEQ ID NO: 21032 - DNA, 21 bp, Homo sapiens
tctgaggttaygttccttctg

SEQ ID NO: 21033 - DNA, 21 bp, Homo sapiens
ctctccagttycctctaggtt

SEQ ID NO: 21034 - DNA, 21 bp, Homo sapiens
ggttgacctcsacacccagtc

SEQ ID NO: 21035 - DNA, 21 bp, Homo sapiens
ggagtgagacyaagccctgcc

SEQ ID NO: 21036 - DNA, 21 bp, Homo sapiens
aaggagggagwcagcgccccc

SEQ ID NO: 21037 - DNA, 21 bp, Homo sapiens
ccattctccakcttaaaattt

SEQ ID NO: 21038 - DNA, 21 bp, Homo sapiens
tctcacctgayttcgcagctc

SEQ ID NO: 21039 - DNA, 21 bp, Homo sapiens
aatatgtttcstagccttata

SEQ ID NO: 21040 - DNA, 21 bp, Homo sapiens
tgagcaacagrtgaccaatta

SEQ ID NO: 21041 - DNA, 21 bp, Homo sapiens
aaataacacasaaatttccat

SEQ ID NO: 21042 - DNA, 21 bp, Homo sapiens
gctccagttcrtggcgtagct

SEQ ID NO: 21043 - DNA, 21 bp, Homo sapiens
tgagtgtgttycggggatgga

SEQ ID NO: 21044 - DNA, 21 bp, Homo sapiens
tctgggattcyaacatggcac

SEQ ID NO: 21045 - DNA, 21 bp, Homo sapiens
agcatgggacrtctctgccta

SEQ ID NO: 21046 - DNA, 21 bp, Homo sapiens
atctttgctaycctgggactt

SEQ ID NO: 21047 - DNA, 21 bp, Homo sapiens
taggtctcccygagagtttac

SEQ ID NO: 21048 - DNA, 21 bp, Homo sapiens
tcccctctgayggtaatgcct

SEQ ID NO: 21049 - DNA, 21 bp, Homo sapiens
agatgacctcratgggccctt

SEQ ID NO: 21050 - DNA, 21 bp, Homo sapiens
tctgcggggaraaagaacaag

SEQ ID NO: 21051 - DNA, 21 bp, Homo sapiens
ataatgcaaargtctgggcga

SEQ ID NO: 21052 - DNA, 21 bp, Homo sapiens
ttaaggcaaargccaagctgg

SEQ ID NO: 21053 - DNA, 21 bp, Homo sapiens
aagcaaacatygaagctgcgt

SEQ ID NO: 21054 - DNA, 21 bp, Homo sapiens
tcacggcctcrgaagctttta

SEQ ID NO: 21055 - DNA, 21 bp, Homo sapiens
aaggctctggratcgcatccg

SEQ ID NO: 21056 - DNA, 21 bp, Homo sapiens
ccagagattcrgggatttggc

SEQ ID NO: 21057 - DNA, 21 bp, Homo sapiens
ctccacaaatkctgctgtcac

SEQ ID NO: 21058 - DNA, 21 bp, Homo sapiens
tgacgctaggraagatacttg

SEQ ID NO: 21059 - DNA, 21 bp, Homo sapiens
tggccatttayctaaggtgcc

SEQ ID NO: 21060 - DNA, 21 bp, Homo sapiens
ctgacatggtrtgccaagcac

SEQ ID NO: 21061 - DNA, 21 bp, Homo sapiens
cataggcaggmggtcttattc

SEQ ID NO: 21062 - DNA, 21 bp, Homo sapiens
tttgcataatkaaaaaaatac

SEQ ID NO: 21063 - DNA, 21 bp, Homo sapiens
tttccaaaatrctctagtcag

SEQ ID NO: 21064 - DNA, 21 bp, Homo sapiens
ctctctgttgyactattagaa

SEQ ID NO: 21065 - DNA, 21 bp, Homo sapiens
tcttggatatygatattgtcc

SEQ ID NO: 21066 - DNA, 21 bp, Homo sapiens
aaagccaatgsaatgaactcc

SEQ ID NO: 21067 - DNA, 21 bp, Homo sapiens
ctactccctcrgggttttatg

SEQ ID NO: 21068 - DNA, 21 bp, Homo sapiens
ggtggagtgasagcccacaat

SEQ ID NO: 21069 - DNA, 21 bp, Homo sapiens
tctattgttgratattgcagc

SEQ ID NO: 21070 - DNA, 21 bp, Homo sapiens
tcctttcctayatacacttgt

SEQ ID NO: 21071 - DNA, 21 bp, Homo sapiens
gtcaaatgcaygtccatccca

SEQ ID NO: 21072 - DNA, 21 bp, Homo sapiens
tatggaaacayaatttactca

SEQ ID NO: 21073 - DNA, 21 bp, Homo sapiens
aggggcctcakgcactctgac

SEQ ID NO: 21074 - DNA, 21 bp, Homo sapiens
atcccacgagygcgtgggcgc

SEQ ID NO: 21075 - DNA, 21 bp, Homo sapiens
agtcctcagtwatgcacttcc

SEQ ID NO: 21076 - DNA, 21 bp, Homo sapiens
agcggctgtgrcttatgtcat

SEQ ID NO: 21077 - DNA, 21 bp, Homo sapiens
gcctgaggccrgaaggaaagg

SEQ ID NO: 21078 - DNA, 21 bp, Homo sapiens
ctgccccaggrcccccagctg

SEQ ID NO: 21079 - DNA, 21 bp, Homo sapiens
gggcgatttcrcagaaaccca

SEQ ID NO: 21080 - DNA, 21 bp, Homo sapiens
ctgaaggcctyctgttccctg

SEQ ID NO: 21081 - DNA, 21 bp, Homo sapiens
tctgcagggcytgccacacaa

SEQ ID NO: 21082 - DNA, 21 bp, Homo sapiens
gggaggccacrcccaccagca

SEQ ID NO: 21083 - DNA, 21 bp, Homo sapiens
cactggctccrggtgggtggg

SEQ ID NO: 21084 - DNA, 21 bp, Homo sapiens
aaataaggccrcagtctcagg

SEQ ID NO: 21085 - DNA, 21 bp, Homo sapiens
aaaataaccasataaaatttt

SEQ ID NO: 21086 - DNA, 21 bp, Homo sapiens
catcacctccsggccgtttcc

SEQ ID NO: 21087 - DNA, 21 bp, Homo sapiens
ttgctgtgccsccccgcaacc

SEQ ID NO: 21088 - DNA, 21 bp, Homo sapiens
gcttccgtgcrcgaggcctca

SEQ ID NO: 21089 - DNA, 21 bp, Homo sapiens
taactgggcasctggccatta

SEQ ID NO: 21090 - DNA, 21 bp, Homo sapiens
tacatgaatgyttctgttgct

SEQ ID NO: 21091 - DNA, 21 bp, Homo sapiens
ctgctcagcawcctcttcata

SEQ ID NO: 21092 - DNA, 21 bp, Homo sapiens
gaatttcaccyaacgctagaa

SEQ ID NO: 21093 - DNA, 21 bp, Homo sapiens
cattttcttaytgatgtatta

SEQ ID NO: 21094 - DNA, 21 bp, Homo sapiens
ctcagctgatyaaggggattc

SEQ ID NO: 21095 - DNA, 21 bp, Homo sapiens
tgggaattaamagaagtaccc

SEQ ID NO: 21096 - DNA, 21 bp, Homo sapiens
tttgttcttaragattcttaa

SEQ ID NO: 21097 - DNA, 21 bp, Homo sapiens
gatgtagttaytgtgttctag

SEQ ID NO: 21098 - DNA, 21 bp, Homo sapiens
gcactgtgagsgagttgaaaa

SEQ ID NO: 21099 - DNA, 21 bp, Homo sapiens
atgtttttacytccatttagt

SEQ ID NO: 21100 - DNA, 21 bp, Homo sapiens
agttagactgsccacagtgaa

SEQ ID NO: 21101 - DNA, 21 bp, Homo sapiens
gcctatggggwcataccagcc

SEQ ID NO: 21102 - DNA, 21 bp, Homo sapiens
tcttagcttaytaaaggcaga

SEQ ID NO: 21103 - DNA, 21 bp, Homo sapiens
atttataaaaytgaccctttc

SEQ ID NO: 21104 - DNA, 21 bp, Homo sapiens
agctcctcaayagatacactt

SEQ ID NO: 21105 - DNA, 21 bp, Homo sapiens
gaggtctacaragaatgaagg

SEQ ID NO: 21106 - DNA, 21 bp, Homo sapiens
gacaaacatcwgtgaagttat

SEQ ID NO: 21107 - DNA, 21 bp, Homo sapiens
taaattatttsttgagaatga

SEQ ID NO: 21108 - DNA, 21 bp, Homo sapiens
tattgctgctkcttcttatgt

SEQ ID NO: 21109 - DNA, 21 bp, Homo sapiens
gccacggagaytgtgcttaaa

SEQ ID NO: 21110 - DNA, 21 bp, Homo sapiens
gttgcaaatgkgtgatttttg

SEQ ID NO: 21111 - DNA, 21 bp, Homo sapiens
catttatttgrtaaggcaaaa

SEQ ID NO: 21112 - DNA, 21 bp, Homo sapiens
aatttaaatcwgcatttctgt

SEQ ID NO: 21113 - DNA, 21 bp, Homo sapiens
ctgaatctgcrtaatctgaca

SEQ ID NO: 21114 - DNA, 21 bp, Homo sapiens
agtaggtctcrtttgacatta

SEQ ID NO: 21115 - DNA, 21 bp, Homo sapiens
atacagtctawcaattcctgc

SEQ ID NO: 21116 - DNA, 21 bp, Homo sapiens
gtcattgggcstaccctttgg

SEQ ID NO: 21117 - DNA, 21 bp, Homo sapiens
attaaaagacycagtggggtt

SEQ ID NO: 21118 - DNA, 21 bp, Homo sapiens
gtgtaccttcyacctagattt

SEQ ID NO: 21119 - DNA, 21 bp, Homo sapiens
ctgttcctggrcccaaaggta

SEQ ID NO: 21120 - DNA, 21 bp, Homo sapiens
ttttgtgttgragatgctgcc

SEQ ID NO: 21121 - DNA, 21 bp, Homo sapiens
gcccacttttstttttagtaa

SEQ ID NO: 21122 - DNA, 21 bp, Homo sapiens
aacctctagckgggcaactat

SEQ ID NO: 21123 - DNA, 21 bp, Homo sapiens
tatcttacacwgtagatgaat

SEQ ID NO: 21124 - DNA, 21 bp, Homo sapiens
ggctgttaacrctcaggaaca

SEQ ID NO: 21125 - DNA, 21 bp, Homo sapiens
ctttattgaarttgtgccagt

SEQ ID NO: 21126 - DNA, 21 bp, Homo sapiens
agatttttctygaatatatga

SEQ ID NO: 21127 - DNA, 21 bp, Homo sapiens
gttcattcatrtagctcattt

SEQ ID NO: 21128 - DNA, 21 bp, Homo sapiens
gtttctggatmttttaaaaac

SEQ ID NO: 21129 - DNA, 21 bp, Homo sapiens
ttagtgagctrtacccctaat

SEQ ID NO: 21130 - DNA, 21 bp, Homo sapiens
tttcaactgakacacctgctt

SEQ ID NO: 21131 - DNA, 21 bp, Homo sapiens
tagaaagagtygaacaaccgt

SEQ ID NO: 21132 - DNA, 21 bp, Homo sapiens
tatgaactcaycatttatcat

SEQ ID NO: 21133 - DNA, 21 bp, Homo sapiens
acatttttgtrttcccatatg

SEQ ID NO: 21134 - DNA, 21 bp, Homo sapiens
acttttgcacrgtgaggaggg

SEQ ID NO: 21135 - DNA, 21 bp, Homo sapiens
aaatatttcartctaatcctt

SEQ ID NO: 21136 - DNA, 21 bp, Homo sapiens
caactacaaasacagatctta

SEQ ID NO: 21137 - DNA, 21 bp, Homo sapiens
tgaaagtagcraactagacac

SEQ ID NO: 21138 - DNA, 21 bp, Homo sapiens
cctctttcttygtgacagtca

SEQ ID NO: 21139 - DNA, 21 bp, Homo sapiens
taatttgtagsacactttaca

SEQ ID NO: 21140 - DNA, 21 bp, Homo sapiens
tacatgtgagytgtatcctga

SEQ ID NO: 21141 - DNA, 21 bp, Homo sapiens
cctgtggaatrtgactccctg

SEQ ID NO: 21142 - DNA, 21 bp, Homo sapiens
atagaaaaagwaatacgggct

SEQ ID NO: 21143 - DNA, 21 bp, Homo sapiens
taaaatgccaygtatatgacc

SEQ ID NO: 21144 - DNA, 21 bp, Homo sapiens
tatgaggtccmtaaaggcagt

SEQ ID NO: 21145 - DNA, 21 bp, Homo sapiens
taatacactcygagtttttgt

SEQ ID NO: 21146 - DNA, 21 bp, Homo sapiens
caaaggataargaattaaaat

SEQ ID NO: 21147 - DNA, 21 bp, Homo sapiens
actcaacattyctgttaccct

SEQ ID NO: 21148 - DNA, 21 bp, Homo sapiens
gtaagtagtgyaggcatatga

SEQ ID NO: 21149 - DNA, 21 bp, Homo sapiens
gctgttaacgycctagtacag

SEQ ID NO: 21150 - DNA, 21 bp, Homo sapiens
ttagacttctrcctcatgctc

SEQ ID NO: 21151 - DNA, 21 bp, Homo sapiens
atttggatacmtattttaaag

SEQ ID NO: 21152 - DNA, 21 bp, Homo sapiens
tgccccttgasggttgtgaac

SEQ ID NO: 21153 - DNA, 21 bp, Homo sapiens
attttaagccktctttgggta

SEQ ID NO: 21154 - DNA, 21 bp, Homo sapiens
aataattaagrggataaaagt

SEQ ID NO: 21155 - DNA, 21 bp, Homo sapiens
tgctgcaaacygaagcgttca

SEQ ID NO: 21156 - DNA, 21 bp, Homo sapiens
tctgattactyctggaaacag

SEQ ID NO: 21157 - DNA, 21 bp, Homo sapiens
cagacaatagmaatgatattc

SEQ ID NO: 21158 - DNA, 21 bp, Homo sapiens
atttatatggmtttatttttc

SEQ ID NO: 21159 - DNA, 21 bp, Homo sapiens
ttaaaaccackaatctctata

SEQ ID NO: 21160 - DNA, 21 bp, Homo sapiens
cagagactccrgggaataggc

SEQ ID NO: 21161 - DNA, 21 bp, Homo sapiens
tattctttctrcaagtatttg

SEQ ID NO: 21162 - DNA, 21 bp, Homo sapiens
cttacttacamttgtgattat

SEQ ID NO: 21163 - DNA, 21 bp, Homo sapiens
taacataccartgaagaactc

SEQ ID NO: 21164 - DNA, 21 bp, Homo sapiens
accaaaatcaygactttatta

SEQ ID NO: 21165 - DNA, 21 bp, Homo sapiens
ttaacaaaaakaagttgatgt

SEQ ID NO: 21166 - DNA, 21 bp, Homo sapiens
ttctagttgarggaaggctca

SEQ ID NO: 21167 - DNA, 21 bp, Homo sapiens
tcataaacgcrgtgaagctag

SEQ ID NO: 21168 - DNA, 21 bp, Homo sapiens
ctgcttcctckgaggcctgat

SEQ ID NO: 21169 - DNA, 21 bp, Homo sapiens
accatatacarcattggaaac

SEQ ID NO: 21170 - DNA, 21 bp, Homo sapiens
aaatggaaatkccagagaggg

SEQ ID NO: 21171 - DNA, 21 bp, Homo sapiens
tcagcttcatraattggaaga

SEQ ID NO: 21172 - DNA, 21 bp, Homo sapiens
tggggtagtaygtaaaaatat

SEQ ID NO: 21173 - DNA, 21 bp, Homo sapiens
gtggctgttayattccataag

SEQ ID NO: 21174 - DNA, 21 bp, Homo sapiens
cttgactcttktccttagaag

SEQ ID NO: 21175 - DNA, 21 bp, Homo sapiens
ggggcagttgrgctaaagtat

SEQ ID NO: 21176 - DNA, 21 bp, Homo sapiens
agttctttttytggtggtacc

SEQ ID NO: 21177 - DNA, 21 bp, Homo sapiens
cacaaaccagstgcttattat

SEQ ID NO: 21178 - DNA, 21 bp, Homo sapiens
aatactaaatrtttggacatt

SEQ ID NO: 21179 - DNA, 21 bp, Homo sapiens
gattaacagcycatatggatt

SEQ ID NO: 21180 - DNA, 21 bp, Homo sapiens
ctatatcctarttagtgacct

SEQ ID NO: 21181 - DNA, 21 bp, Homo sapiens
acactaatcartacataaaac

SEQ ID NO: 21182 - DNA, 21 bp, Homo sapiens
gggtttcttcyaagtgtgata

SEQ ID NO: 21183 - DNA, 21 bp, Homo sapiens
ctaactaaggrgcaagttatt

SEQ ID NO: 21184 - DNA, 21 bp, Homo sapiens
aactcaccttygaaaccaaat

SEQ ID NO: 21185 - DNA, 21 bp, Homo sapiens
gaatttccccrgtactcctta

SEQ ID NO: 21186 - DNA, 21 bp, Homo sapiens
attattttgargctgaaaggg

SEQ ID NO: 21187 - DNA, 21 bp, Homo sapiens
gctgtgcctaycatccagcat

SEQ ID NO: 21188 - DNA, 21 bp, Homo sapiens
aaaatgcatcygcataggact

SEQ ID NO: 21189 - DNA, 21 bp, Homo sapiens
gggagattagmatactgcctc

SEQ ID NO: 21190 - DNA, 21 bp, Homo sapiens
gtgtctttccrtaagagttaa

SEQ ID NO: 21191 - DNA, 21 bp, Homo sapiens
aacattgggtmccccttctta

SEQ ID NO: 21192 - DNA, 21 bp, Homo sapiens
ttagctttctratagcaacaa

SEQ ID NO: 21193 - DNA, 21 bp, Homo sapiens
gtaatcaaaawctacttagtt

SEQ ID NO: 21194 - DNA, 21 bp, Homo sapiens
atttaatcttkaaaaactttt

SEQ ID NO: 21195 - DNA, 21 bp, Homo sapiens
taggatctccwtctacttaat

SEQ ID NO: 21196 - DNA, 21 bp, Homo sapiens
ggatcagacaytgactttgcc

SEQ ID NO: 21197 - DNA, 21 bp, Homo sapiens
tatatgagctyatgaaatgga

SEQ ID NO: 21198 - DNA, 21 bp, Homo sapiens
tctttggtgtscaaggcagga

SEQ ID NO: 21199 - DNA, 21 bp, Homo sapiens
gcgtgctcagrtgctatgctg

SEQ ID NO: 21200 - DNA, 21 bp, Homo sapiens
taatgaaattrggcgctttga

SEQ ID NO: 21201 - DNA, 21 bp, Homo sapiens
tatcattgctrttttttcctt

SEQ ID NO: 21202 - DNA, 21 bp, Homo sapiens
cactgcctaaytccttgtgta

SEQ ID NO: 21203 - DNA, 21 bp, Homo sapiens
atgcctaaaayacgtgctgta

SEQ ID NO: 21204 - DNA, 21 bp, Homo sapiens
agcaaactacragactgctag

SEQ ID NO: 21205 - DNA, 21 bp, Homo sapiens
gtgttagggtmctaagctgat

SEQ ID NO: 21206 - DNA, 21 bp, Homo sapiens
ggcagctcgtyggaaaatata

SEQ ID NO: 21207 - DNA, 21 bp, Homo sapiens
gagaattaaaragaagacctt

SEQ ID NO: 21208 - DNA, 21 bp, Homo sapiens
tagagctaagrtctatgtctt

SEQ ID NO: 21209 - DNA, 21 bp, Homo sapiens
acggacagccrgtattccttc

SEQ ID NO: 21210 - DNA, 21 bp, Homo sapiens
catgcacttayacgttatcac

SEQ ID NO: 21211 - DNA, 21 bp, Homo sapiens
gtgaggctacygctgagtgac

SEQ ID NO: 21212 - DNA, 21 bp, Homo sapiens
ttgatggcagygcagatccca

SEQ ID NO: 21213 - DNA, 21 bp, Homo sapiens
gtgtctgtctyatctagcagt

SEQ ID NO: 21214 - DNA, 21 bp, Homo sapiens
accctacctayatagcagttc

SEQ ID NO: 21215 - DNA, 21 bp, Homo sapiens
cgagttttccrctacacatta

SEQ ID NO: 21216 - DNA, 21 bp, Homo sapiens
tttactaattktatgaatcag

SEQ ID NO: 21217 - DNA, 21 bp, Homo sapiens
gatatactctycctctacatt

SEQ ID NO: 21218 - DNA, 21 bp, Homo sapiens
cagggagtcarcagagctaga

SEQ ID NO: 21219 - DNA, 21 bp, Homo sapiens
atcttaaatayataagccttc

SEQ ID NO: 21220 - DNA, 21 bp, Homo sapiens
tttcaaagtcmagttttgaat

SEQ ID NO: 21221 - DNA, 21 bp, Homo sapiens
gctatgtacawtactcaaaag

SEQ ID NO: 21222 - DNA, 21 bp, Homo sapiens
acacacaagawatccttaaac

SEQ ID NO: 21223 - DNA, 21 bp, Homo sapiens
agaaaatacayctctctgggt

SEQ ID NO: 21224 - DNA, 21 bp, Homo sapiens
atgaactgagmaaattacatc

SEQ ID NO: 21225 - DNA, 21 bp, Homo sapiens
aatgaaccacyacatcctggt

SEQ ID NO: 21226 - DNA, 21 bp, Homo sapiens
catgggagtgygcctttcccc

SEQ ID NO: 21227 - DNA, 21 bp, Homo sapiens
tttccagcacyagaccagaag

SEQ ID NO: 21228 - DNA, 21 bp, Homo sapiens
gggagttggtraaatatcaga

SEQ ID NO: 21229 - DNA, 21 bp, Homo sapiens
catacccgttrtggtgctccg

SEQ ID NO: 21230 - DNA, 21 bp, Homo sapiens
tttcctctatktcataaacct

SEQ ID NO: 21231 - DNA, 21 bp, Homo sapiens
ggggaaggaawgacacaggga

SEQ ID NO: 21232 - DNA, 21 bp, Homo sapiens
agcagctacaraaggagtcgg

SEQ ID NO: 21233 - DNA, 21 bp, Homo sapiens
tggatgcatcratcatgtttt

SEQ ID NO: 21234 - DNA, 21 bp, Homo sapiens
atgcacttacrttttcttata

SEQ ID NO: 21235 - DNA, 21 bp, Homo sapiens
atcttagagayaaagttcaga

SEQ ID NO: 21236 - DNA, 21 bp, Homo sapiens
aaagactgtarggtaagcatg

SEQ ID NO: 21237 - DNA, 21 bp, Homo sapiens
gtctgtggtgstcagtcacct

SEQ ID NO: 21238 - DNA, 21 bp, Homo sapiens
ctgcactaacyaaggatcaaa

SEQ ID NO: 21239 - DNA, 21 bp, Homo sapiens
tccttcttaayctagttctgc

SEQ ID NO: 21240 - DNA, 21 bp, Homo sapiens
gtttggaatargttatttttc

SEQ ID NO: 21241 - DNA, 21 bp, Homo sapiens
aattcacaagwtctgatctct

SEQ ID NO: 21242 - DNA, 21 bp, Homo sapiens
cgtgcacaccyggggaaggag

SEQ ID NO: 21243 - DNA, 21 bp, Homo sapiens
gtgaatgctgrtgtcaaaaaa

SEQ ID NO: 21244 - DNA, 21 bp, Homo sapiens
cagttacatargtgagtcacg

SEQ ID NO: 21245 - DNA, 21 bp, Homo sapiens
agctaggggamggtcaagctc

SEQ ID NO: 21246 - DNA, 21 bp, Homo sapiens
tgcttagagaraaccatgtag

SEQ ID NO: 21247 - DNA, 21 bp, Homo sapiens
gcagcaccagsgcctgcagtg

SEQ ID NO: 21248 - DNA, 21 bp, Homo sapiens
acagaccaggwagacatgagt

SEQ ID NO: 21249 - DNA, 21 bp, Homo sapiens
gaagtaacaaygaggcatcca

SEQ ID NO: 21250 - DNA, 21 bp, Homo sapiens
tttaatttttyttcctacttg

SEQ ID NO: 21251 - DNA, 21 bp, Homo sapiens
ccaggaagtaygagaaatgcc

SEQ ID NO: 21252 - DNA, 21 bp, Homo sapiens
ttgcatgatayaggtctgcaa

SEQ ID NO: 21253 - DNA, 21 bp, Homo sapiens
tatcacttctrtattcttgtg

SEQ ID NO: 21254 - DNA, 21 bp, Homo sapiens
gacaatcagarccactaaaag

SEQ ID NO: 21255 - DNA, 21 bp, Homo sapiens
ctgtttgtaamatttgctcgt

SEQ ID NO: 21256 - DNA, 21 bp, Homo sapiens
caaaatagaasccttcagttg

SEQ ID NO: 21257 - DNA, 21 bp, Homo sapiens
cactgatcctrttgaagcaca

SEQ ID NO: 21258 - DNA, 21 bp, Homo sapiens
ccgaagagctraacaatccca

SEQ ID NO: 21259 - DNA, 21 bp, Homo sapiens
tacttttcaamaactttgccc

SEQ ID NO: 21260 - DNA, 21 bp, Homo sapiens
tggcatggaaygaacttatca

SEQ ID NO: 21261 - DNA, 21 bp, Homo sapiens
tgacctctgtrtatagacata

SEQ ID NO: 21262 - DNA, 21 bp, Homo sapiens
taaagtttaargttcattctc

SEQ ID NO: 21263 - DNA, 21 bp, Homo sapiens
actggggcatyattagaagag

SEQ ID NO: 21264 - DNA, 21 bp, Homo sapiens
tattgagtccrttttgcccaa

SEQ ID NO: 21265 - DNA, 21 bp, Homo sapiens
gccatgagtcrgggacagctt

SEQ ID NO: 21266 - DNA, 21 bp, Homo sapiens
tgaaattgtcytctcattctt

SEQ ID NO: 21267 - DNA, 21 bp, Homo sapiens
aaatctaagtstatgtaagat

SEQ ID NO: 21268 - DNA, 21 bp, Homo sapiens
gagcaccacartcgccagcaa

SEQ ID NO: 21269 - DNA, 21 bp, Homo sapiens
agctctcaaartctgtgatcc

SEQ ID NO: 21270 - DNA, 21 bp, Homo sapiens
gtaatcaggaygactcccttt

SEQ ID NO: 21271 - DNA, 21 bp, Homo sapiens
actggggtcayctggatagct

SEQ ID NO: 21272 - DNA, 21 bp, Homo sapiens
tcttgttctcrtaatccttga

SEQ ID NO: 21273 - DNA, 21 bp, Homo sapiens
ggaatttctaygtgcatgcct

SEQ ID NO: 21274 - DNA, 21 bp, Homo sapiens
taacagaattrcccatcaagt

SEQ ID NO: 21275 - DNA, 21 bp, Homo sapiens
atatagtttcycaaaactttc

SEQ ID NO: 21276 - DNA, 21 bp, Homo sapiens
caaaacaactktaaatgattc

SEQ ID NO: 21277 - DNA, 21 bp, Homo sapiens
aggttatatayaatagttgct

SEQ ID NO: 21278 - DNA, 21 bp, Homo sapiens
tgcctagcccraagaggttct

SEQ ID NO: 21279 - DNA, 21 bp, Homo sapiens
ggctgagacartgcacctata

SEQ ID NO: 21280 - DNA, 21 bp, Homo sapiens
atcttttagaytggtggttgt

SEQ ID NO: 21281 - DNA, 21 bp, Homo sapiens
gtctttgcccyggagtctgag

SEQ ID NO: 21282 - DNA, 21 bp, Homo sapiens
ggggccatttygctcaagtgc

SEQ ID NO: 21283 - DNA, 21 bp, Homo sapiens
gtacaatcctrcattccttga

SEQ ID NO: 21284 - DNA, 21 bp, Homo sapiens
gccagctgctrttgtccctgt

SEQ ID NO: 21285 - DNA, 21 bp, Homo sapiens
gctcaggtcaygtaccaatca

SEQ ID NO: 21286 - DNA, 21 bp, Homo sapiens
gcactaattcratttccaccc

SEQ ID NO: 21287 - DNA, 21 bp, Homo sapiens
aggcttccccrgatgatggca

SEQ ID NO: 21288 - DNA, 21 bp, Homo sapiens
tgagggtaaaytgggaattga

SEQ ID NO: 21289 - DNA, 21 bp, Homo sapiens
gagggttcaayctaagagttt

SEQ ID NO: 21290 - DNA, 21 bp, Homo sapiens
ccctgattaaygtttcgtgtg

SEQ ID NO: 21291 - DNA, 21 bp, Homo sapiens
aaagaactgtrcctaatgaaa

SEQ ID NO: 21292 - DNA, 21 bp, Homo sapiens
ttcatctttcyggtaatctct

SEQ ID NO: 21293 - DNA, 21 bp, Homo sapiens
ggcctagaatygcacgagcag

SEQ ID NO: 21294 - DNA, 21 bp, Homo sapiens
gatgcctgctracaatcagaa

SEQ ID NO: 21295 - DNA, 21 bp, Homo sapiens
ggccttatacktgggtagttt

SEQ ID NO: 21296 - DNA, 21 bp, Homo sapiens
atatctcaatktcctaaattt

SEQ ID NO: 21297 - DNA, 21 bp, Homo sapiens
tacacatccartcatgtttga

SEQ ID NO: 21298 - DNA, 21 bp, Homo sapiens
acagtgaggcraaaagaaggg

SEQ ID NO: 21299 - DNA, 21 bp, Homo sapiens
ttggtgtaaaytcagatccaa

SEQ ID NO: 21300 - DNA, 21 bp, Homo sapiens
tattgccaagmaaaagtcagg

SEQ ID NO: 21301 - DNA, 21 bp, Homo sapiens
aagagcaccgratcagggaaa

SEQ ID NO: 21302 - DNA, 21 bp, Homo sapiens
tcacagagggsaagtaacagg

SEQ ID NO: 21303 - DNA, 21 bp, Homo sapiens
ctccattgaaycaactttttt

SEQ ID NO: 21304 - DNA, 21 bp, Homo sapiens
agagacccacrtcggtcatta

SEQ ID NO: 21305 - DNA, 21 bp, Homo sapiens
cgttcaataartgaatgaatt

SEQ ID NO: 21306 - DNA, 21 bp, Homo sapiens
tcctaagtgaytctaagacca

SEQ ID NO: 21307 - DNA, 21 bp, Homo sapiens
acacatttttsgcagcctgag

SEQ ID NO: 21308 - DNA, 21 bp, Homo sapiens
ttgtgagagtsgtttgcatat

SEQ ID NO: 21309 - DNA, 21 bp, Homo sapiens
ctaatacttcrttttggagct

SEQ ID NO: 21310 - DNA, 21 bp, Homo sapiens
aaatatacaartgctagagaa

SEQ ID NO: 21311 - DNA, 21 bp, Homo sapiens
cagtttaacartcttcatcct

SEQ ID NO: 21312 - DNA, 21 bp, Homo sapiens
caaggaaagargcataatcta

SEQ ID NO: 21313 - DNA, 21 bp, Homo sapiens
cttttttttcygttttacaat

SEQ ID NO: 21314 - DNA, 21 bp, Homo sapiens
attattcaacygagttagggc

SEQ ID NO: 21315 - DNA, 21 bp, Homo sapiens
tatcattaggmtatatcatta

SEQ ID NO: 21316 - DNA, 21 bp, Homo sapiens
gaagtgatacytgtttgtaag

SEQ ID NO: 21317 - DNA, 21 bp, Homo sapiens
cttccagtgtygccgccagca

SEQ ID NO: 21318 - DNA, 21 bp, Homo sapiens
tgttattcacygcatgaactt

SEQ ID NO: 21319 - DNA, 21 bp, Homo sapiens
cctgcctataygagatatctc

SEQ ID NO: 21320 - DNA, 21 bp, Homo sapiens
ttcactacttyggaatttaac

SEQ ID NO: 21321 - DNA, 21 bp, Homo sapiens
ataatatttaytggtgagtat

SEQ ID NO: 21322 - DNA, 21 bp, Homo sapiens
taggtcttttytctgaaactg

SEQ ID NO: 21323 - DNA, 21 bp, Homo sapiens
tttaaaggcaytttggacacg

SEQ ID NO: 21324 - DNA, 21 bp, Homo sapiens
taatgtgcatycagcagaagc

SEQ ID NO: 21325 - DNA, 21 bp, Homo sapiens
atgtcgtttargagggtcttt

SEQ ID NO: 21326 - DNA, 21 bp, Homo sapiens
gtggaaaaacrggtccattag

SEQ ID NO: 21327 - DNA, 21 bp, Homo sapiens
taagaaaaaartccactaagt

SEQ ID NO: 21328 - DNA, 21 bp, Homo sapiens
cattcccataratgcttttgt

SEQ ID NO: 21329 - DNA, 21 bp, Homo sapiens
cccactttccratactctaaa

SEQ ID NO: 21330 - DNA, 21 bp, Homo sapiens
tatatccacartctattacat

SEQ ID NO: 21331 - DNA, 21 bp, Homo sapiens
ctcggcacaayccgcccgggc

SEQ ID NO: 21332 - DNA, 21 bp, Homo sapiens
gcagtgctcamggtattcgtg

SEQ ID NO: 21333 - DNA, 21 bp, Homo sapiens
gtccactgaartctttggtag

SEQ ID NO: 21334 - DNA, 21 bp, Homo sapiens
catttacttcygcttctgggc

SEQ ID NO: 21335 - DNA, 21 bp, Homo sapiens
cgtgaaccttygtcacatccc

SEQ ID NO: 21336 - DNA, 21 bp, Homo sapiens
aaatagctacrgaccaaggac

SEQ ID NO: 21337 - DNA, 21 bp, Homo sapiens
gcccttgccarcgcggacggc

SEQ ID NO: 21338 - DNA, 21 bp, Homo sapiens
acatagggtcrggtatgacag

SEQ ID NO: 21339 - DNA, 21 bp, Homo sapiens
tttctggatckattctctaac

SEQ ID NO: 21340 - DNA, 21 bp, Homo sapiens
aatgagtccaygtgcctaacc

SEQ ID NO: 21341 - DNA, 21 bp, Homo sapiens
tttatagaaayagttttggat

SEQ ID NO: 21342 - DNA, 21 bp, Homo sapiens
tactgtgatgmacaaaagaag

SEQ ID NO: 21343 - DNA, 21 bp, Homo sapiens
caataacaacraacctttgtt

SEQ ID NO: 21344 - DNA, 21 bp, Homo sapiens
aataattaackgtttcaaaag

SEQ ID NO: 21345 - DNA, 21 bp, Homo sapiens
gggaggtagayggtggagagt

SEQ ID NO: 21346 - DNA, 21 bp, Homo sapiens
atgattctctrccatgcgcat

SEQ ID NO: 21347 - DNA, 21 bp, Homo sapiens
tattccctgtytacacatgaa

SEQ ID NO: 21348 - DNA, 21 bp, Homo sapiens
ctttgtatgcwagagtctgtc

SEQ ID NO: 21349 - DNA, 21 bp, Homo sapiens
ccacctttctytttgctaaga

SEQ ID NO: 21350 - DNA, 21 bp, Homo sapiens
gtttgaggaamtaactttctt

SEQ ID NO: 21351 - DNA, 21 bp, Homo sapiens
catgctgtttyatttctctgt

SEQ ID NO: 21352 - DNA, 21 bp, Homo sapiens
ttcagatacgwttgtcctggt

SEQ ID NO: 21353 - DNA, 21 bp, Homo sapiens
tgggaagtagyaaacttctct

SEQ ID NO: 21354 - DNA, 21 bp, Homo sapiens
ccgggctctaytgtggccaca

SEQ ID NO: 21355 - DNA, 21 bp, Homo sapiens
tagcccagatktgtagattgc

SEQ ID NO: 21356 - DNA, 21 bp, Homo sapiens
acctacaagtyctgtcattat

SEQ ID NO: 21357 - DNA, 21 bp, Homo sapiens
ctaaagataarttttgcttgg

SEQ ID NO: 21358 - DNA, 21 bp, Homo sapiens
tttctgagcartatttgttca

SEQ ID NO: 21359 - DNA, 21 bp, Homo sapiens
gacaattgttrtaaacataac

SEQ ID NO: 21360 - DNA, 21 bp, Homo sapiens
ttaaatgttaycttcaaaatg

SEQ ID NO: 21361 - DNA, 21 bp, Homo sapiens
gtcttttaaarttaaaaaatc

SEQ ID NO: 21362 - DNA, 21 bp, Homo sapiens
tatttatatcyttttaaattt

SEQ ID NO: 21363 - DNA, 21 bp, Homo sapiens
tgttatatatrgttccaccag

SEQ ID NO: 21364 - DNA, 21 bp, Homo sapiens
catttttgtamggaatcattt

SEQ ID NO: 21365 - DNA, 21 bp, Homo sapiens
aattgatcttkgtaaaacaaa

SEQ ID NO: 21366 - DNA, 21 bp, Homo sapiens
tcctcaaataycagagataaa

SEQ ID NO: 21367 - DNA, 21 bp, Homo sapiens
aaggcaatccsgtactgaaga

SEQ ID NO: 21368 - DNA, 21 bp, Homo sapiens
agttaggattrtattatttta

SEQ ID NO: 21369 - DNA, 21 bp, Homo sapiens
cctgagaaaaygaaggttctg

SEQ ID NO: 21370 - DNA, 21 bp, Homo sapiens
gctgttccatygctatcccag

SEQ ID NO: 21371 - DNA, 21 bp, Homo sapiens
gagatgcaggraactgaaagg

SEQ ID NO: 21372 - DNA, 21 bp, Homo sapiens
actcctgctayatgactacat

SEQ ID NO: 21373 - DNA, 21 bp, Homo sapiens
ttaaactattygataagatgc

SEQ ID NO: 21374 - DNA, 21 bp, Homo sapiens
ttatgtcttgstcatggatct

SEQ ID NO: 21375 - DNA, 21 bp, Homo sapiens
caagacagggmatgtgcaaag

SEQ ID NO: 21376 - DNA, 21 bp, Homo sapiens
gctctattgcytaatacacta

SEQ ID NO: 21377 - DNA, 21 bp, Homo sapiens
cttggaaccaycatgtgagat

SEQ ID NO: 21378 - DNA, 21 bp, Homo sapiens
ttggcctttcrtatctacctg

SEQ ID NO: 21379 - DNA, 21 bp, Homo sapiens
agtatttggtrtaacgtcctc

SEQ ID NO: 21380 - DNA, 21 bp, Homo sapiens
taccattccamacttctatca

SEQ ID NO: 21381 - DNA, 21 bp, Homo sapiens
atgtctacctmatcttttaaa

SEQ ID NO: 21382 - DNA, 21 bp, Homo sapiens
taaacacttawaacaatgttt

SEQ ID NO: 21383 - DNA, 21 bp, Homo sapiens
gcaacttttakaaacaaagta

SEQ ID NO: 21384 - DNA, 21 bp, Homo sapiens
taccatctaayggaggtactg

SEQ ID NO: 21385 - DNA, 21 bp, Homo sapiens
tagaaatagaktctaggtaat

SEQ ID NO: 21386 - DNA, 21 bp, Homo sapiens
tcagcaactaygtccaacctt

SEQ ID NO: 21387 - DNA, 21 bp, Homo sapiens
agaaaaagtarttaagcagtc

SEQ ID NO: 21388 - DNA, 21 bp, Homo sapiens
agctgctgacratttgaaact

SEQ ID NO: 21389 - DNA, 21 bp, Homo sapiens
ttaagttagayactccacgat

SEQ ID NO: 21390 - DNA, 21 bp, Homo sapiens
tgtgaggcctrgtaacaacct

SEQ ID NO: 21391 - DNA, 21 bp, Homo sapiens
atgaagtaatrtaattttaga

SEQ ID NO: 21392 - DNA, 21 bp, Homo sapiens
ttagtaaagtmttttctgcag

SEQ ID NO: 21393 - DNA, 21 bp, Homo sapiens
tataaggaatyaaatactgta

SEQ ID NO: 21394 - DNA, 21 bp, Homo sapiens
ttagaataacrgtaagtgcac

SEQ ID NO: 21395 - DNA, 21 bp, Homo sapiens
tactcctaagrtagagaaaat

SEQ ID NO: 21396 - DNA, 21 bp, Homo sapiens
tgaggaagacsacaggggtcc

SEQ ID NO: 21397 - DNA, 21 bp, Homo sapiens
ttgtctcctargttgatgaga

SEQ ID NO: 21398 - DNA, 21 bp, Homo sapiens
atccttaaagytgggatgata

SEQ ID NO: 21399 - DNA, 21 bp, Homo sapiens
gttttgcaagygattaaattc

SEQ ID NO: 21400 - DNA, 21 bp, Homo sapiens
atgatttgaartgactatttt

SEQ ID NO: 21401 - DNA, 21 bp, Homo sapiens
ctggaagaaakcagactgcag

SEQ ID NO: 21402 - DNA, 21 bp, Homo sapiens
atgctaaaaayaggtttccaa

SEQ ID NO: 21403 - DNA, 21 bp, Homo sapiens
taatctcaaayaataaagaat

SEQ ID NO: 21404 - DNA, 21 bp, Homo sapiens
aactgagggcrccaaggtcac

SEQ ID NO: 21405 - DNA, 21 bp, Homo sapiens
gaatttcaaaraagttgaata

SEQ ID NO: 21406 - DNA, 21 bp, Homo sapiens
tgttaaatcasgctaaaatgt

SEQ ID NO: 21407 - DNA, 21 bp, Homo sapiens
tgattgtaagyataattgatt

SEQ ID NO: 21408 - DNA, 21 bp, Homo sapiens
agagagagcasctggtacatg

SEQ ID NO: 21409 - DNA, 21 bp, Homo sapiens
tccactagcayttaccagcct

SEQ ID NO: 21410 - DNA, 21 bp, Homo sapiens
acaagattccrttaagagaaa

SEQ ID NO: 21411 - DNA, 21 bp, Homo sapiens
aatttatagcmgtgtacactc

SEQ ID NO: 21412 - DNA, 21 bp, Homo sapiens
atggcacagawtctgtttaca

SEQ ID NO: 21413 - DNA, 21 bp, Homo sapiens
taaagcctgaygaatcaagtc

SEQ ID NO: 21414 - DNA, 21 bp, Homo sapiens
gaacatatackgcttctagac

SEQ ID NO: 21415 - DNA, 21 bp, Homo sapiens
tgaaaaaatawaagatcccat

SEQ ID NO: 21416 - DNA, 21 bp, Homo sapiens
aaacttcaagyttaccatatt

SEQ ID NO: 21417 - DNA, 21 bp, Homo sapiens
tcctcatgagygctcttcgtg

SEQ ID NO: 21418 - DNA, 21 bp, Homo sapiens
gcaggtagctkgtgataaaac

SEQ ID NO: 21419 - DNA, 21 bp, Homo sapiens
agcaccattarcgttgggccg

SEQ ID NO: 21420 - DNA, 21 bp, Homo sapiens
ttcagaagacmacagagaaaa

SEQ ID NO: 21421 - DNA, 21 bp, Homo sapiens
tgcactttcayccagctgtac

SEQ ID NO: 21422 - DNA, 21 bp, Homo sapiens
tattgggcatwccttcttcca

SEQ ID NO: 21423 - DNA, 21 bp, Homo sapiens
tataacacatmtgatgatttc

SEQ ID NO: 21424 - DNA, 21 bp, Homo sapiens
gacttcatatsgtctttaaac

SEQ ID NO: 21425 - DNA, 21 bp, Homo sapiens
ccctcaatccsaaatctcggc

SEQ ID NO: 21426 - DNA, 21 bp, Homo sapiens
gcagaagctawggcaactaaa

SEQ ID NO: 21427 - DNA, 21 bp, Homo sapiens
aagtagttttscaggtttttg

SEQ ID NO: 21428 - DNA, 21 bp, Homo sapiens
gagagtgatcrttgtaattat

SEQ ID NO: 21429 - DNA, 21 bp, Homo sapiens
tgtgaaaaatstgtttatagg

SEQ ID NO: 21430 - DNA, 21 bp, Homo sapiens
atgtaaatggrccagcaaaga

SEQ ID NO: 21431 - DNA, 21 bp, Homo sapiens
aatcttaatamcaccagagtt

SEQ ID NO: 21432 - DNA, 21 bp, Homo sapiens
ctaagtaaatrtcttaatctg

SEQ ID NO: 21433 - DNA, 21 bp, Homo sapiens
ttgtaacaggrcaaaattttg

SEQ ID NO: 21434 - DNA, 21 bp, Homo sapiens
ctaagtttatrtaattgtgaa

SEQ ID NO: 21435 - DNA, 21 bp, Homo sapiens
atttatatagygtggctagaa

SEQ ID NO: 21436 - DNA, 21 bp, Homo sapiens
tccatatcagwaaatacgatt

SEQ ID NO: 21437 - DNA, 21 bp, Homo sapiens
tatttattttwgaacaacact

SEQ ID NO: 21438 - DNA, 21 bp, Homo sapiens
gaagaatatakagcaatgtca

SEQ ID NO: 21439 - DNA, 21 bp, Homo sapiens
catcagaaccyatgacaattt

SEQ ID NO: 21440 - DNA, 21 bp, Homo sapiens
ttctttttagractttatata

SEQ ID NO: 21441 - DNA, 21 bp, Homo sapiens
cgcaagaaagraaagggcttt

SEQ ID NO: 21442 - DNA, 21 bp, Homo sapiens
atttttatctrtttgcacttg

SEQ ID NO: 21443 - DNA, 21 bp, Homo sapiens
aattttactarttttttcttg

SEQ ID NO: 21444 - DNA, 21 bp, Homo sapiens
tttttatctaytaaacaagca

SEQ ID NO: 21445 - DNA, 21 bp, Homo sapiens
attgattcatmtctcacagaa

SEQ ID NO: 21446 - DNA, 21 bp, Homo sapiens
ttgtttaaaaragatgttttg

SEQ ID NO: 21447 - DNA, 21 bp, Homo sapiens
ctttcatcctygaaacctgac

SEQ ID NO: 21448 - DNA, 21 bp, Homo sapiens
tgtccaaagtrcatggtttcg

SEQ ID NO: 21449 - DNA, 21 bp, Homo sapiens
atgatggtagrccactgggta

SEQ ID NO: 21450 - DNA, 21 bp, Homo sapiens
acacacttcayattctgcctt

SEQ ID NO: 21451 - DNA, 21 bp, Homo sapiens
gtaatacaatstggataggat

SEQ ID NO: 21452 - DNA, 21 bp, Homo sapiens
atggtcagtarcaggtgtgta

SEQ ID NO: 21453 - DNA, 21 bp, Homo sapiens
tgctaatggawtaattattgg

SEQ ID NO: 21454 - DNA, 21 bp, Homo sapiens
tagagctaggwttacattgtc

SEQ ID NO: 21455 - DNA, 21 bp, Homo sapiens
tgccttggagmaagatacaca

SEQ ID NO: 21456 - DNA, 21 bp, Homo sapiens
ctaagtagaarttattctaat

SEQ ID NO: 21457 - DNA, 21 bp, Homo sapiens
acataatagcractttctcct

SEQ ID NO: 21458 - DNA, 21 bp, Homo sapiens
gaaaaatacarctggagtgtg

SEQ ID NO: 21459 - DNA, 21 bp, Homo sapiens
ttcagtcagtrgttcatggca

SEQ ID NO: 21460 - DNA, 21 bp, Homo sapiens
ttaaccacaayctgagctccc

SEQ ID NO: 21461 - DNA, 21 bp, Homo sapiens
tagcaacattyttgtttatac

SEQ ID NO: 21462 - DNA, 21 bp, Homo sapiens
ctggagcgggycaaagctgaa

SEQ ID NO: 21463 - DNA, 21 bp, Homo sapiens
agcatttttgmctgataccct

SEQ ID NO: 21464 - DNA, 21 bp, Homo sapiens
taatctgtgtstagtgataag

SEQ ID NO: 21465 - DNA, 21 bp, Homo sapiens
aggtagaggcrggccctagag

SEQ ID NO: 21466 - DNA, 21 bp, Homo sapiens
ctaatcatacygaataggcca

SEQ ID NO: 21467 - DNA, 21 bp, Homo sapiens
cactacccgtytgaccaccct

SEQ ID NO: 21468 - DNA, 21 bp, Homo sapiens
tatatacacayctccctgaaa

SEQ ID NO: 21469 - DNA, 21 bp, Homo sapiens
ggagaatcatrgctgctgtga

SEQ ID NO: 21470 - DNA, 21 bp, Homo sapiens
tccatttaatrtggcacttca

SEQ ID NO: 21471 - DNA, 21 bp, Homo sapiens
gctaggtcccrataactgaaa

SEQ ID NO: 21472 - DNA, 21 bp, Homo sapiens
tgcctccacasactacaggca

SEQ ID NO: 21473 - DNA, 21 bp, Homo sapiens
atggcagggtyaagttgtttt

SEQ ID NO: 21474 - DNA, 21 bp, Homo sapiens
tgatgtgccarggacatcttt

SEQ ID NO: 21475 - DNA, 21 bp, Homo sapiens
cactacccgtytgaccaccct

SEQ ID NO: 21476 - DNA, 21 bp, Homo sapiens
tatatacacayctccctgaaa

SEQ ID NO: 21477 - DNA, 21 bp, Homo sapiens
ggagaatcatrgctgctgtga

SEQ ID NO: 21478 - DNA, 21 bp, Homo sapiens
tccatttaatrtggcacttca

SEQ ID NO: 21479 - DNA, 21 bp, Homo sapiens
gctaggtcccrataactgaaa

SEQ ID NO: 21480 - DNA, 21 bp, Homo sapiens
tgcctccacasactacaggca

SEQ ID NO: 21481 - DNA, 21 bp, Homo sapiens
gctggagtgcracaaaatgct

SEQ ID NO: 21482 - DNA, 21 bp, Homo sapiens
ggctggtctcrttttgtattt

SEQ ID NO: 21483 - DNA, 21 bp, Homo sapiens
ttgcccctgcragctcactgt

SEQ ID NO: 21484 - DNA, 21 bp, Homo sapiens
aaaagtaaatrgccctgctgg

SEQ ID NO: 21485 - DNA, 21 bp, Homo sapiens
agatcactcayggttcattaa

SEQ ID NO: 21486 - DNA, 21 bp, Homo sapiens
taatcttgatmaagccaagtc

SEQ ID NO: 21487 - DNA, 21 bp, Homo sapiens
actcatggaayaatataacta

SEQ ID NO: 21488 - DNA, 21 bp, Homo sapiens
ctgtagtcccycaaatccttg

SEQ ID NO: 21489 - DNA, 21 bp, Homo sapiens
ctacaagataycttagcttat

SEQ ID NO: 21490 - DNA, 21 bp, Homo sapiens
ctgtagtcccycaaatccttg

SEQ ID NO: 21491 - DNA, 21 bp, Homo sapiens
ctacaagataycttagcttat

SEQ ID NO: 21492 - DNA, 21 bp, Homo sapiens
ccatctctacyacttgtgccc

SEQ ID NO: 21493 - DNA, 21 bp, Homo sapiens
gtcccagctaraatttaaaaa

SEQ ID NO: 21494 - DNA, 21 bp, Homo sapiens
ctcccaaagtyaaataaaaat

SEQ ID NO: 21495 - DNA, 21 bp, Homo sapiens
ggctggtctcrttttgtattt

SEQ ID NO: 21496 - DNA, 21 bp, Homo sapiens
ttgcccctgcragctcactgt

SEQ ID NO: 21497 - DNA, 21 bp, Homo sapiens
aaaagtaaatrgccctgctgg

SEQ ID NO: 21498 - DNA, 21 bp, Homo sapiens
gtggctctctmtagaaggctt
